(19) United States
(12) Patent Application Publication
(10) Pub. No.: US 2025/0136984 A1
(43) Pub. Date: May 1, 2025

(54) OLIGONUCLEOTIDE AGONISTS TARGETING PROGRANULIN

(71) Applicant: Hoffmann-La Roche Inc., Little Falls, NJ (US)

(72) Inventors: Ravi JAGASIA, Basel (CH); Lars JOENSON, Hørsholm (DK); Søren RASMUSSEN, Hørsholm (DK); Disa TEHLER, Hørsholm (DK); Dorthe Vang LARSEN, Hørsholm (DK); Jesper WORM, Hørsholm (DK)

(73) Assignee: Hoffmann-La Roche Inc., Little Falls, NJ (US)

(21) Appl. No.: 18/904,968

(22) Filed: Oct. 2, 2024

Related U.S. Application Data
(62) Division of application No. 17/320,139, filed on May 13, 2021, now Pat. No. 12,203,071.

(30) Foreign Application Priority Data
May 13, 2020 (EP) 20174322.6
Nov. 30, 2020 (EP) 20210822.1

(51) Int. Cl. C12N 15/113; A61P 25/00

(52) U.S. Cl. CPC C12N 15/113; A61P 25/00; C12N 2310/11; C12N 2310/315; C12N 2310/3231; C12N 2310/3341

(57) ABSTRACT

The present invention relates to oligonucleotides which up-regulate or restore the expression of progranulin in cells, and their use in the treatment of neurological disorders, and disorders associated with progranulin haploinsufficiency.

### CROSS-REFERENCE TO RELATED APPLICATIONS

[0001] This application is a divisional of U.S. patent application Ser. No. 17/320,139, filed on May 13, 2021, which claims the benefit of priority to European Patent Application No. EP20174322.6 filed on May 13, 2020, and to European Patent Application No. EP20210822.1 filed on Nov. 30, 2020, each of which is incorporated herein by reference.

### SEQUENCE LISTING

[0002] The application contains a Sequence Listing which has been submitted electronically in .XML format and is hereby incorporated by reference in its entirety. Said .XML copy, created on Dec. 27, 2024, is named “067211.017US2.xml” and is 5,228,908 bytes in size. The sequence listing contained in this .XML file is part of the specification and is hereby incorporated by reference herein in its entirety.

### FIELD OF INVENTION

[0003] The present invention relates to oligonucleotides which up-regulate or restore the expression of progranulin in cells, and their use in the treatment of neurological disorders, and disorders associated with progranulin haploinsufficiency.

### BACKGROUND

[0004] Progranulin (PGRN) is a highly conserved secreted protein that is expressed in multiple cell types, both in the CNS and in peripheral tissues.

[0005] Deficiency of the secreted protein progranulin in the central nervous system causes the neurodegenerative disease fronto temporal dementia (FTD). Pathogenic progranulin (GRN) mutations lead to a loss of about 50% in progranulin levels through haploinsufficiency and to intraneuronal aggregation of TDP-43 protein. Progranulin plays a supportive and protective role in numerous processes within the brain, including neurite outgrowth, synapse biology, response to exogenous stressors, lysosomal function, neuroinflammation, and angiogenesis in both cell autonomous and non-autonomous manners.

[0006] In several neurodegenerative diseases TDP-43 is a common denominator. TDP-43 pathology is associated with cytoplasmic TDP-43 aggregation. For example, more than 95% of ALS patients display pathological mislocalization of TDP-43 and several mutations in its gene cause familial ALS.

[0007] The presence of cytoplasmic TDP-43 aggregates is associated with a concomitant loss of nuclear TDP-43, and there is evidence of both loss of function and gain of function associated pathophysiologies.

[0008] Both directly and via its conversion to granulins, progranulin regulates lysosomal function, cell growth, survival, repair, and inflammation. Progranulin has a major role in regulation of lysosomal function associated microglial responses in the CNS. Autosomal dominant mutations of the progranulin (GRN) gene leading to protein haploinsufficiency are linked to familial frontotemporal dementia with neuropathologic frontotemporal lobar degeneration (FTLD) associated with accumulation of TAR-DNA binding protein of 43 kDA (TDP-43) inclusions (FTLD-TDP). Homozygous GRN mutations are linked to neuronal ceroid lipofuscinosis (NCL) (Townley, et al., Neurology. 2018 Jun. 12; 90(24): 1127).

[0009] Mutations in the progranulin gene (GRN) have recently been identified as a cause of about 5% of all FTD, including some sporadic cases. Recent studies using mouse models has defined the expression of PGRN in the brain (Petkau et al., 2010). PGRN is expressed late in neurodevelopment, localizing with markers of mature neurons. PGRN is expressed in neurons in most brain regions, with highest expression in the thalamus, hippocampus, and cortex. Microglia cells also express progranulin, and the level of expression is upregulated by microglial activation. Around 70 different GRN mutations have been identified in FTD and all reduce progranulin levels or result in loss of progranulin function.

[0010] WO 2020/077165 reports on AAV particle delivery of therapeutic nucleic acids, and lists progranulin as a potential gene of interest.

[0011] There is therefore an urgent need for therapeutic agents which can increase the expression of progranulin.

### SUMMARY OF INVENTION

[0012] The invention provides antisense oligonucleotide agonists of progranulin or antisense oligonucleotide progranulin agonists—i.e. antisense oligonucleotides which are complementary to a progranulin nucleic acid sequence, and which are capable of up-regulating the expression of progranulin. Alternatively stated, the invention provides antisense oligonucleotide positive modulators (i.e. agonists) of progranulin.

[0013] The antisense oligonucleotides of the invention may therefore be used to restore progranulin expression in cells which exhibit progranulin haploinsufficiency, or to enhance expression of progranulin in cells.

[0014] The invention provides an antisense oligonucleotide progranulin agonist, wherein the antisense oligonucleotide is 8-40 nucleotides in length and comprises a contiguous nucleotide sequence of 8-40 nucleotides in length which are complementary, such as fully complementary, to a human progranulin precursor-mRNA (pre-mRNA) or mature mRNA transcript.

[0015] The invention provides an antisense oligonucleotide progranulin agonist, wherein the antisense oligonucleotide is 12-40 nucleotides in length and comprises a contiguous nucleotide sequence of 12-40 nucleotides in length which are complementary, such as fully complementary, to a human progranulin precursor-mRNA (pre-mRNA) or mature mRNA transcript.

[0016] The invention provides an antisense oligonucleotide progranulin agonist, wherein the antisense oligonucleotide is 12-20 nucleotides in length and comprises a contiguous nucleotide sequence of 12-20 nucleotides in length which are complementary, such as fully complementary, to a human progranulin precursor-mRNA (pre-mRNA) or mature mRNA transcript.

[0017] The invention provides an antisense oligonucleotide progranulin agonist, wherein the antisense oligonucleotide is 14-18 nucleotides in length and comprises a contiguous nucleotide sequence of 14-18 nucleotides in length which are complementary, such as fully complementary, to a human progranulin precursor-mRNA (pre-mRNA) or mature mRNA transcript.

[0018] The invention provides an antisense oligonucleotide progranulin agonist, wherein the antisense oligonucleotide is 12-18 nucleotides in length and comprises a contiguous nucleotide sequence of 12-18 nucleotides in length which are complementary, such as fully complementary, to a human progranulin precursor-mRNA (pre-mRNA) or mature mRNA transcript.

[0019] The invention provides an antisense oligonucleotide progranulin agonist, wherein the antisense oligonucleotide is 8-40 nucleotides in length and comprises a contiguous nucleotide sequence of 8-40 nucleotides in length which are complementary, such as fully complementary, to SEQ ID NO 2 or 689.

[0020] The invention provides an antisense oligonucleotide progranulin agonist, wherein the antisense oligonucleotide is 12-40 nucleotides in length and comprises a contiguous nucleotide sequence of 12-40 nucleotides in length which are complementary, such as fully complementary, to SEQ ID NO 2 or 689.

[0021] The invention provides an antisense oligonucleotide progranulin agonist, wherein the antisense oligonucleotide is 12-20 nucleotides in length and comprises a contiguous nucleotide sequence of 12-20 nucleotides in length which are complementary, such as fully complementary, to SEQ ID NO 2 or 689.

[0022] The invention provides an antisense oligonucleotide progranulin agonist, wherein the antisense oligonucleotide is 14-18 nucleotides in length and comprises a contiguous nucleotide sequence of 14-18 nucleotides in length which are complementary, such as fully complementary, to SEQ ID NO 2 or 689.

[0023] The invention provides an antisense oligonucleotide progranulin agonist, wherein the antisense oligonucleotide is 12-18 nucleotides in length and comprises a contiguous nucleotide sequence of 12-18 nucleotides in length which are complementary, such as fully complementary, to SEQ ID NO 2 or 689.

[0024] The invention provides an antisense oligonucleotide progranulin agonist, wherein the antisense oligonucleotide is 8-40 nucleotides in length and comprises a contiguous nucleotide sequence of 8-40 nucleotides in length which are complementary, such as fully complementary, to a sequence selected from the group consisting of SEQ ID NO 683, 684, 685, 686, 687 and 688.

[0025] The invention provides an antisense oligonucleotide progranulin agonist, wherein the antisense oligonucleotide is 12-40 nucleotides in length and comprises a contiguous nucleotide sequence of 12-40 nucleotides in length which are complementary, such as fully complementary, to a sequence selected from the group consisting of SEQ ID NO 683, 684, 685, 686, 687 and 688.

[0026] The invention provides an antisense oligonucleotide progranulin agonist, wherein the antisense oligonucleotide is 12-20 nucleotides in length and comprises a contiguous nucleotide sequence of 12-20 nucleotides in length which are complementary, such as fully complementary, to a sequence selected from the group consisting of SEQ ID NO 683, 684, 685, 686, 687 and 688.

[0027] The invention provides an antisense oligonucleotide progranulin agonist, wherein the antisense oligonucleotide is 14-18 nucleotides in length and comprises a contiguous nucleotide sequence of 14-18 nucleotides in length which are complementary, such as fully complementary, to a to a sequence selected from the group consisting of SEQ ID NO 683, 684, 685, 686, 687 and 688.

[0028] The invention provides an antisense oligonucleotide progranulin agonist, wherein the antisense oligonucleotide is 12-18 nucleotides in length and comprises a contiguous nucleotide sequence of 12-18 nucleotides in length which are complementary, such as fully complementary, to a sequence selected from the group consisting of SEQ ID NO 683, 684, 685, 686, 687 and 688.

[0029] The antisense oligonucleotide progranulin agonist may be 8, 9, 10, 11, 12, 13, 14, 15, 16, 17, 18, 19, 20, 21, 22, 23, 24, 25, 26, 27, 28, 29, 30, 31, 32, 33, 34, 35, 36, 37, 38, 39 or 40 nucleotides in length. In some embodiments the antisense oligonucleotide, or contiguous nucleotide sequence thereof, is 8-40, 12-40, 12-20, 14-18, 12-18 or 16-18 nucleotides in length.

[0030] The contiguous nucleotide sequence may be 8, 9, 10, 11, 12, 13, 14, 15, 16, 17, 18, 19, 20, 21, 22, 23, 24, 25, 26, 27, 28, 29, 30, 31, 32, 33, 34, 35, 36, 37, 38, 39 or 40 nucleotides in length. In some embodiments, the contiguous nucleotide sequence is of a length of at least 12 nucleotides in length, such as 12-16 or 12-18 nucleotides in length.

[0031] In some embodiments, the contiguous nucleotide sequence is the same length as the antisense oligonucleotide progranulin agonist.

[0032] In some embodiments the antisense oligonucleotide consists of the contiguous nucleotide sequence.

[0033] In some embodiments the antisense oligonucleotide is the contiguous nucleotide sequence. In some embodiments, the contiguous nucleotide sequence is fully complementary to a sequence selected from the group consisting of SEQ ID NO 343-682.

[0034] In some embodiments the contiguous nucleotide sequence is complementary, such as fully complementary, to the human progranulin mature mRNA (SEQ ID NO: 1).

[0035] In some embodiments the contiguous nucleotide sequence is complementary, such as fully complementary, to the human progranulin precursor-mRNA (pre-mRNA) (SEQ ID NO: 3949).

[0036] In some embodiments, the contiguous nucleotide sequence is complementary, such as fully complementary, to a 5′UTR region of a human progranulin mature mRNA transcript. Herein the 5′ UTR is defined as nucleotides 38 to 241 according to RefSeq NM_002807.3 (SEQ ID NO 1).

[0037] In some embodiments, the contiguous nucleotide sequence is complementary, such as fully complementary, to nucleotides 38-246 of SEQ ID NO 1. In some embodiments, the contiguous nucleotide sequence is complementary, such as fully complementary, to SEQ ID NO 689.

[0038] In some embodiments, the contiguous nucleotide sequence is complementary, such as fully complementary, to SEQ ID NO 2.

[0039] In some embodiments, the contiguous nucleotide sequence is complementary, such as fully complementary, to SEQ ID NO 683.

[0040] In some embodiments, the contiguous nucleotide sequence is complementary, such as fully complementary, to a sequence selected from the group consisting of SEQ ID NO 343-586.

[0041] In some embodiments, the contiguous nucleotide sequence is complementary, such as fully complementary, to a sequence selected from the group consisting of SEQ ID NO 568, SEQ ID NO 571, SEQ ID NO 575, SEQ ID NO 576, SEQ ID NO 577, SEQ ID NO 578, SEQ ID NO 584, & SEQ ID NO 586.

[0042] In some embodiments, the contiguous nucleotide sequence is a sequence selected from the group consisting of SEQ ID NO 3-342, or at least 8 contiguous nucleotides thereof.

[0043] In some embodiments, the contiguous nucleotide sequence is a sequence selected from the group consisting of SEQ ID NO 3-342, or at least 9 contiguous nucleotides thereof.

[0044] In some embodiments, the contiguous nucleotide sequence is a sequence selected from the group consisting of SEQ ID NO 3-342, or at least 10 contiguous nucleotides thereof.

[0045] In some embodiments, the contiguous nucleotide sequence is a sequence selected from the group consisting of SEQ ID NO 3-342, or at least 11 contiguous nucleotides thereof.

[0046] In some embodiments, the contiguous nucleotide sequence is a sequence selected from the group consisting of SEQ ID NO 3-342, or at least 12 contiguous nucleotides thereof.

[0047] In some embodiments, the contiguous nucleotide sequence is a sequence selected from the group consisting of SEQ ID NO 3-342, or at least 13 contiguous nucleotides thereof.

[0048] In some embodiments, the contiguous nucleotide sequence is a sequence selected from the group consisting of SEQ ID NO 3-342, or at least 14 contiguous nucleotides thereof.

[0049] In some embodiments, the contiguous nucleotide sequence is a sequence selected from the group consisting of SEQ ID NO 3-342, or at least 15 contiguous nucleotides thereof.

[0050] In some embodiments, the contiguous nucleotide sequence is a sequence selected from the group consisting of SEQ ID NO 3-342, or at least 16 contiguous nucleotides thereof.

[0051] In some embodiments, the contiguous nucleotide sequence is selected from SEQ ID NO 105, SEQ ID NO 106, SEQ ID NO 110, SEQ ID NO 113, SEQ ID NO 114, SEQ ID NO 231 and SEQ ID NO 241 or at least 8 or at least 10 contiguous nucleotides thereof.

[0052] In some embodiments the contiguous nucleotide sequence is SEQ ID NO 106.

[0053] In some embodiments the contiguous nucleotide sequence is SEQ ID NO 110.

[0054] In some embodiments, the contiguous nucleotide sequence is complementary, such as fully complementary, to a 3′UTR region of a human progranulin mature mRNA transcript. Herein the 3′ UTR is defined as nucleotides 2044 to 2346 according to RefSeq NM_002807.3 (SEQ ID NO 1).

[0055] In some embodiments, the contiguous nucleotide sequence is complementary, such as fully complementary, to nucleotides 2039-2346 of SEQ ID NO 1.

[0056] In some embodiments, the contiguous nucleotide sequence is complementary, such as fully complementary, to a sequence selected from the group consisting of SEQ ID NO 684, SEQ ID NO 685, SEQ ID NO 686, SEQ ID NO 687, and SEQ ID NO 688.

[0057] In some embodiments, the contiguous nucleotide sequence is complementary, such as fully complementary, to a sequence selected from the group consisting of SEQ ID NO 587-682.

[0058] In some embodiments, the contiguous nucleotide sequence is complementary, such as fully complementary, to a sequence selected from the group consisting of SEQ ID NO 607, SEQ ID NO 608, SEQ ID NO 609, SEQ ID NO 610, SEQ ID NO 611, SEQ ID NO 612, SEQ ID NO 619, SEQ ID NO 620, SEQ ID NO 633, SEQ ID NO 640, SEQ ID NO 641, SEQ ID NO 645, SEQ ID NO 651, and SEQ ID NO 652.

[0059] In some embodiments, the contiguous nucleotide sequence is complementary, such as fully complementary, to a sequence selected from the group consisting of SEQ ID NO 2040-3386.

[0060] In some embodiments, the contiguous nucleotide sequence is complementary, such as fully complementary, to a sequence selected from the group consisting of SEQ ID NO 2040-3386 or at least 8 contiguous nucleotides thereof.

[0061] In some embodiments, the contiguous nucleotide sequence is complementary, such as fully complementary, to a sequence selected from the group consisting of SEQ ID NO 2040-3386 or at least 9 contiguous nucleotides thereof.

[0062] In some embodiments, the contiguous nucleotide sequence is complementary, such as fully complementary, to a sequence selected from the group consisting of SEQ ID NO 2040-3386 or at least 10 contiguous nucleotides thereof.

[0063] In some embodiments, the contiguous nucleotide sequence is complementary, such as fully complementary, to a sequence selected from the group consisting of SEQ ID NO 2040-3386 or at least 11 contiguous nucleotides thereof.

[0064] In some embodiments, the contiguous nucleotide sequence is complementary, such as fully complementary, to a sequence selected from the group consisting of SEQ ID NO 2040-3386 or at least 12 contiguous nucleotides thereof.

[0065] In some embodiments, the contiguous nucleotide sequence is complementary, such as fully complementary, to a sequence selected from the group consisting of SEQ ID NO 2040-3386 or at least 13 contiguous nucleotides thereof.

[0066] In some embodiments, the contiguous nucleotide sequence is complementary, such as fully complementary, to a sequence selected from the group consisting of SEQ ID NO 2040-3386 or at least 14 contiguous nucleotides thereof.

[0067] In some embodiments, the contiguous nucleotide sequence is complementary, such as fully complementary, to a sequence selected from the group consisting of SEQ ID NO 2040-3386 or at least 15 contiguous nucleotides thereof.

[0068] In some embodiments, the contiguous nucleotide sequence is complementary, such as fully complementary, to a sequence selected from the group consisting of SEQ ID NO 2040-3386 or at least 16 contiguous nucleotides thereof.

[0069] In some embodiments, the contiguous nucleotide sequence is complementary, such as fully complementary, to a sequence selected from the group consisting of SEQ ID 2321, SEQ ID 2322, SEQ ID 2324, SEQ ID 2328, SEQ ID 2329, SEQ ID 2331, SEQ ID 2334, SEQ ID 2335, SEQ ID 2336, SEQ ID 2337, SEQ ID 2338, SEQ ID 2339, SEQ ID 2340, SEQ ID 2341, SEQ ID 2342, SEQ ID 2345, SEQ ID 2346, SEQ ID 2347, SEQ ID 2348, SEQ ID 2349, SEQ ID 2350, SEQ ID 2351, SEQ ID 2352, SEQ ID 2353, SEQ ID 2354, SEQ ID 2355, SEQ ID 2356, SEQ ID 2357, SEQ ID 2358, SEQ ID 2359, SEQ ID 2360, SEQ ID 2361, SEQ ID 2362, SEQ ID 2364, SEQ ID 2365, SEQ ID 2366, SEQ ID 2367, SEQ ID 2368, SEQ ID 2369, SEQ ID 2370, SEQ ID 2371, SEQ ID 2372, SEQ ID 2373, SEQ ID 2374, SEQ ID 2375, SEQ ID 2376, SEQ ID 2377, SEQ ID 2378, SEQ ID 2379, SEQ ID 2380, SEQ ID 2381, SEQ ID 2384, SEQ ID 2386, SEQ ID 2387, SEQ ID 2388, SEQ ID 2389, SEQ ID 2390, SEQ ID 2392, SEQ ID 2393, SEQ ID 2394, SEQ ID 2395, SEQ ID 2396, SEQ ID 2397, SEQ ID 2398, SEQ ID 2399, SEQ ID 2400, SEQ ID 2401, SEQ ID 2403, SEQ ID 2404, SEQ ID 2405, SEQ ID 2406, SEQ ID 2407, SEQ ID 2408, SEQ ID 2410, SEQ ID 2411, SEQ ID 2413, SEQ ID 2414, SEQ ID 2415, SEQ ID 2416, SEQ ID 2418, SEQ ID 2419, SEQ ID 2421, SEQ ID 2424, SEQ ID 2425, SEQ ID 2426, SEQ ID 2427, SEQ ID 2428, SEQ ID 2429, SEQ ID 2430, SEQ ID 2431, SEQ ID 2432, SEQ ID 2433, SEQ ID 2434, SEQ ID 2435, SEQ ID 2436, SEQ ID 2437, SEQ ID 2438, SEQ ID 2439, SEQ ID 2440, SEQ ID 2441, SEQ ID 2442, SEQ ID 2443, SEQ ID 2444, SEQ ID 2445, SEQ ID 2446, SEQ ID 2447, SEQ ID 2448, SEQ ID 2449, SEQ ID 2450, SEQ ID 2451, SEQ ID 2452, SEQ ID 2453, SEQ ID 2454, SEQ ID 2455, SEQ ID 2456, SEQ ID 2457, SEQ ID 2458, SEQ ID 2459, SEQ ID 2460, SEQ ID 2461, SEQ ID 2462, SEQ ID 2463, SEQ ID 2464, SEQ ID 2465, SEQ ID 2466, SEQ ID 2467, SEQ ID 2468, SEQ ID 2469, SEQ ID 2470, SEQ ID 2471, SEQ ID 2472, SEQ ID 2473, SEQ ID 2474, SEQ ID 2475, SEQ ID 2476, SEQ ID 2477, SEQ ID 2478, SEQ ID 2479, SEQ ID 2481, SEQ ID 2482, SEQ ID 2483, SEQ ID 2484, SEQ ID 2485, SEQ ID 2487, SEQ ID 2489, SEQ ID 2490, SEQ ID 2491, SEQ ID 2492, SEQ ID 2493, SEQ ID 2494, SEQ ID 2495, SEQ ID 2496, SEQ ID 2497, SEQ ID 2498, SEQ ID 2499, SEQ ID 2501, SEQ ID 2502, SEQ ID 2503, SEQ ID 2504, SEQ ID 2505, SEQ ID 2506, SEQ ID 2507, SEQ ID 2508, SEQ ID 2509, SEQ ID 2510, SEQ ID 2511, SEQ ID 2512, SEQ ID 2513, SEQ ID 2514, SEQ ID 2515, SEQ ID 2516, SEQ ID 2518, SEQ ID 2519, SEQ ID 2520, SEQ ID 2521, SEQ ID 2522, SEQ ID 2523, SEQ ID 2524, SEQ ID 2525, SEQ ID 2526, SEQ ID 2527, SEQ ID 2528, SEQ ID 2531, SEQ ID 2533, SEQ ID 2534, SEQ ID 2535, SEQ ID 2536, SEQ ID 2537, SEQ ID 2538, SEQ ID 2540, SEQ ID 2541, SEQ ID 2542, SEQ ID 2544, SEQ ID 2546, SEQ ID 2547, SEQ ID 2549, SEQ ID 2550, SEQ ID 2551, SEQ ID 2553, SEQ ID 2554, SEQ ID 2555, SEQ ID 2556, SEQ ID 2557, SEQ ID 2560, SEQ ID 2561, SEQ ID 2562, SEQ ID 2563, SEQ ID 2565, SEQ ID 2566, SEQ ID 2567, SEQ ID 2572, SEQ ID 2573, SEQ ID 2574, SEQ ID 2575, SEQ ID 2576, SEQ ID 2577, SEQ ID 2578, SEQ ID 2579, SEQ ID 2580, SEQ ID 2581, SEQ ID 2582, SEQ ID 2583, SEQ ID 2584, SEQ ID 2585, SEQ ID 2586, SEQ ID 2588, SEQ ID 2589, SEQ ID 2590, SEQ ID 2591, SEQ ID 2592, SEQ ID 2593, SEQ ID 2594, SEQ ID 2595, SEQ ID 2596, SEQ ID 2597, SEQ ID 2598, SEQ ID 2599, SEQ ID 2601, SEQ ID 2602, SEQ ID 2603, SEQ ID 2604, SEQ ID 2606, SEQ ID 2610, SEQ ID 2613, SEQ ID 2614, SEQ ID 2615, SEQ ID 2619, SEQ ID 2622, SEQ ID 2623, SEQ ID 2624, SEQ ID 2625, SEQ ID 2626, SEQ ID 2627, SEQ ID 2628, SEQ ID 2629, SEQ ID 2630, SEQ ID 2631, SEQ ID 2632, SEQ ID 2633, SEQ ID 2634, SEQ ID 2635, SEQ ID 2636, SEQ ID 2637, SEQ ID 2638, SEQ ID 2639, SEQ ID 2640, SEQ ID 2641, SEQ ID 2642, SEQ ID 2643, SEQ ID 2644, SEQ ID 2645, SEQ ID 2646, SEQ ID 2647, SEQ ID 2648, SEQ ID 2649, SEQ ID 2650, SEQ ID 2651, SEQ ID 2652, SEQ ID 2653, SEQ ID 2654, SEQ ID 2655, SEQ ID 2656, SEQ ID 2658, SEQ ID 2659, SEQ ID 2660, SEQ ID 2661, SEQ ID 2662, SEQ ID 2663, SEQ ID 2664, SEQ ID 2665, SEQ ID 2666, SEQ ID 2667, SEQ ID 2668, SEQ ID 2669, SEQ ID 2670, SEQ ID 2671, SEQ ID 2672, SEQ ID 2673, SEQ ID 2674, SEQ ID 2675, SEQ ID 2676, SEQ ID 2677, SEQ ID 2678, SEQ ID 2679, SEQ ID 2680, SEQ ID 2681, SEQ ID 2682, SEQ ID 2683, SEQ ID 2684, SEQ ID 2685, SEQ ID 2686, SEQ ID 2687, SEQ ID 2688, SEQ ID 2689, SEQ ID 2690, SEQ ID 2691, SEQ ID 2693, SEQ ID 2694, SEQ ID 2695, SEQ ID 2696, SEQ ID 2697, SEQ ID 2698, SEQ ID 2699, SEQ ID 2700, SEQ ID 2701, SEQ ID 2702, SEQ ID 2703, SEQ ID 2704, SEQ ID 2705, SEQ ID 2706, SEQ ID 2707, SEQ ID 2708, SEQ ID 2709, SEQ ID 2710, SEQ ID 2711, SEQ ID 2712, SEQ ID 2713, SEQ ID 2714, SEQ ID 2715, SEQ ID 2716, SEQ ID 2717, SEQ ID 2718, SEQ ID 2719, SEQ ID 2720, SEQ ID 2721, SEQ ID 2722, SEQ ID 2723, SEQ ID 2726, SEQ ID 2727, SEQ ID 2728, SEQ ID 2729, SEQ ID 2730, SEQ ID 2733, SEQ ID 2734, SEQ ID 2735, SEQ ID 2736, SEQ ID 2737, SEQ ID 2738, SEQ ID 2739, SEQ ID 2740, SEQ ID 2741, SEQ ID 2742, SEQ ID 2743, SEQ ID 2744, SEQ ID 2745, SEQ ID 2746, SEQ ID 2747, SEQ ID 2748, SEQ ID 2749, SEQ ID 2750, SEQ ID 2751, SEQ ID 2752, SEQ ID 2753, SEQ ID 2754, SEQ ID 2755, SEQ ID 2756, SEQ ID 2757, SEQ ID 2758, SEQ ID 2759, SEQ ID 2760, SEQ ID 2761, SEQ ID 2762, SEQ ID 2763, SEQ ID 2764, SEQ ID 2765, SEQ ID 2766, SEQ ID 2767, SEQ ID 2768, SEQ ID 2769, SEQ ID 2770, SEQ ID 2771, SEQ ID 2772, SEQ ID 2773, SEQ ID 2774, SEQ ID 2775, SEQ ID 2815, SEQ ID 2816, SEQ ID 2817, SEQ ID 2818, SEQ ID 2819, SEQ ID 2820, SEQ ID 2821, SEQ ID 2822, SEQ ID 2823, SEQ ID 2824, SEQ ID 2825, SEQ ID 2826, SEQ ID 2827, SEQ ID 2828, SEQ ID 2829, SEQ ID 2830, SEQ ID 2831, SEQ ID 2832, SEQ ID 2833, SEQ ID 2834, SEQ ID 2835, SEQ ID 2836, SEQ ID 2837, SEQ ID 2838, SEQ ID 2839, SEQ ID 2840, SEQ ID 2841, SEQ ID 2842, SEQ ID 2843, SEQ ID 2844, SEQ ID 2845, SEQ ID 2847, SEQ ID 2848, SEQ ID 2849, SEQ ID 2850, SEQ ID 2851, SEQ ID 2852, SEQ ID 2853, SEQ ID 2854, SEQ ID 2855, SEQ ID 2858, SEQ ID 2859, SEQ ID 2860, SEQ ID 2861, SEQ ID 2862, SEQ ID 2863, SEQ ID 2864, SEQ ID 2865, SEQ ID 2866, SEQ ID 2867, SEQ ID 2868, SEQ ID 2869, SEQ ID 2870, SEQ ID 2871, SEQ ID 2872, SEQ ID 2873, SEQ ID 2874, SEQ ID 2875, SEQ ID 2876, SEQ ID 2878, SEQ ID 2879, SEQ ID 2880, SEQ ID 2881, SEQ ID 2882, SEQ ID 2883, SEQ ID 2884, SEQ ID 2885, SEQ ID 2886, SEQ ID 2887, SEQ ID 2888, SEQ ID 2889, SEQ ID 2890, SEQ ID 2891, SEQ ID 2892, SEQ ID 2893, SEQ ID 2894, SEQ ID 2895, SEQ ID 2896, SEQ ID 2897, SEQ ID 2898, SEQ ID 2899, SEQ ID 2900, SEQ ID 2901, SEQ ID 2902, SEQ ID 2903, SEQ ID 2904, SEQ ID 2905, SEQ ID 2906, SEQ ID 2907, SEQ ID 2908, SEQ ID 2909, SEQ ID 2910, SEQ ID 2911, SEQ ID 2912, SEQ ID 2913, SEQ ID 2914, SEQ ID 2915, SEQ ID 2916, SEQ ID 2917, SEQ ID 2918, SEQ ID 2919, SEQ ID 2920, SEQ ID 2921, SEQ ID 2922, SEQ ID 2923, SEQ ID 2924, SEQ ID 2925, SEQ ID 2926, SEQ ID 2927, SEQ ID 2928, SEQ ID 2929, SEQ ID 2930, SEQ ID 2931, SEQ ID 2932, SEQ ID 2934, SEQ ID 2935, SEQ ID 2936, SEQ ID 2937, SEQ ID 2938, SEQ ID 2939, SEQ ID 2940, SEQ ID 2941, SEQ ID 2942, SEQ ID 2943, SEQ ID 2944, SEQ ID 2945, SEQ ID 2946, SEQ ID 2947, SEQ ID 2948, SEQ ID 2949, SEQ ID 2950, SEQ ID 2951, SEQ ID 2953, SEQ ID 2954, SEQ ID 2955, SEQ ID 2956, SEQ ID 2957, SEQ ID 2958, SEQ ID 2960, SEQ ID 2961, SEQ ID 2963, SEQ ID 2964, SEQ ID 2965, SEQ ID 2966, SEQ ID 2967, SEQ ID 2969, SEQ ID 2970, SEQ ID 2971, SEQ ID 2972, SEQ ID 2973, SEQ ID 2974, SEQ ID 2975, SEQ ID 2976, SEQ ID 2977, SEQ ID 2978, SEQ ID 2979, SEQ ID 2980, SEQ ID 2981, SEQ ID 2982, SEQ ID 2983, SEQ ID 2984, SEQ ID 2985, SEQ ID 3053, SEQ ID 3054, SEQ ID 3055, SEQ ID 3056, SEQ ID 3057, SEQ ID 3058, SEQ ID 3059, SEQ ID 3060, SEQ ID 3061, SEQ ID 3062, SEQ ID 3063, SEQ ID 3064, SEQ ID 3065, SEQ ID 3066, SEQ ID 3068, SEQ ID 3069, SEQ ID 3070, SEQ ID 3071, SEQ ID 3072, SEQ ID 3073, SEQ ID 3074, SEQ ID 3075, SEQ ID 3076, SEQ ID 3077, SEQ ID 3078, SEQ ID 3079, SEQ ID 3080, SEQ ID 3081, SEQ ID 3082, SEQ ID 3083, SEQ ID 3084, SEQ ID 3085, SEQ ID 3086, SEQ ID 3087, SEQ ID 3088, SEQ ID 3089, SEQ ID 3090, SEQ ID 3091, SEQ ID 3092, SEQ ID 3093, SEQ ID 3094, SEQ ID 3095, SEQ ID 3097, SEQ ID 3098, SEQ ID 3099, SEQ ID 3100, SEQ ID 3102, SEQ ID 3103, SEQ ID 3104, SEQ ID 3105, SEQ ID 3106, SEQ ID 3107, SEQ ID 3108, SEQ ID 3109, SEQ ID 3110, SEQ ID 3112, SEQ ID 3113, SEQ ID 3115, SEQ ID 3116, SEQ ID 3117, SEQ ID 3119, SEQ ID 3120, SEQ ID 3121, SEQ ID 3122, SEQ ID 3123, SEQ ID 3124, SEQ ID 3125, SEQ ID 3126, SEQ ID 3127, SEQ ID 3128, SEQ ID 3129, SEQ ID 3130, SEQ ID 3131, SEQ ID 3132, SEQ ID 3133, SEQ ID 3134, SEQ ID 3135, SEQ ID 3136, SEQ ID 3137, SEQ ID 3138, SEQ ID 3139, SEQ ID 3140, SEQ ID 3141, SEQ ID 3142, SEQ ID 3143, SEQ ID 3144, SEQ ID 3145, SEQ ID 3146, SEQ ID 3147, SEQ ID 3148, SEQ ID 3149, SEQ ID 3150, SEQ ID 3151, SEQ ID 3152, SEQ ID 3153, SEQ ID 3154, SEQ ID 3155, SEQ ID 3156, SEQ ID 3157, SEQ ID 3158, SEQ ID 3159, SEQ ID 3160, SEQ ID 3161, SEQ ID 3162, SEQ ID 3163, SEQ ID 3164, SEQ ID 3165, SEQ ID 3166, SEQ ID 3167, SEQ ID 3168, SEQ ID 3169, SEQ ID 3170, SEQ ID 3171, SEQ ID 3172, SEQ ID 3173, SEQ ID 3174, SEQ ID 3175, SEQ ID 3176, SEQ ID 3177, SEQ ID 3178, SEQ ID 3179, SEQ ID 3180, SEQ ID 3181, SEQ ID 3182, SEQ ID 3183, SEQ ID 3184, SEQ ID 3185, SEQ ID 3186, SEQ ID 3187, SEQ ID 3188, SEQ ID 3189, SEQ ID 3190, SEQ ID 3191, SEQ ID 3192, SEQ ID 3193, SEQ ID 3194, SEQ ID 3195, SEQ ID 3196, SEQ ID 3197, SEQ ID 3198, SEQ ID 3199, SEQ ID 3200, SEQ ID 3201, SEQ ID 3202, SEQ ID 3203, SEQ ID 3204, SEQ ID 3205, SEQ ID 3206, SEQ ID 3207, SEQ ID 3208, SEQ ID 3209, SEQ ID 3210, SEQ ID 3211, SEQ ID 3212, SEQ ID 3213, SEQ ID 3214, SEQ ID 3215, SEQ ID 3216, SEQ ID 3217, SEQ ID 3218, SEQ ID 3219, SEQ ID 3220, SEQ ID 3221, SEQ ID 3222, SEQ ID 3223, SEQ ID 3224, SEQ ID 3225, SEQ ID 3226, SEQ ID 3227, SEQ ID 3228, SEQ ID 3229, SEQ ID 3230, SEQ ID 3231, SEQ ID 3232, SEQ ID 3233, SEQ ID 3234, SEQ ID 3235, SEQ ID 3236, SEQ ID 3237, SEQ ID 3238, SEQ ID 3239, SEQ ID 3240, SEQ ID 3241, SEQ ID 3242, SEQ ID 3243, SEQ ID 3244, SEQ ID 3245, SEQ ID 3246, SEQ ID 3248, SEQ ID 3249, SEQ ID 3250, SEQ ID 3251, SEQ ID 3252, SEQ ID 3253, SEQ ID 3254, SEQ ID 3255, SEQ ID 3256, SEQ ID 3257, SEQ ID 3258, SEQ ID 3259, SEQ ID 3260, SEQ ID 3261, SEQ ID 3262, SEQ ID 3263, SEQ ID 3264, SEQ ID 3265, SEQ ID 3266, SEQ ID 3267, SEQ ID 3268, SEQ ID 3269, SEQ ID 3270, SEQ ID 3271, SEQ ID 3272, SEQ ID 3273, SEQ ID 3275, SEQ ID 3276, SEQ ID 3277, SEQ ID 3278, SEQ ID 3279, SEQ ID 3280, SEQ ID 3282, SEQ ID 3284, SEQ ID 3285, SEQ ID 3286, SEQ ID 3287, SEQ ID 3288, SEQ ID 3289, SEQ ID 3291, SEQ ID 3292, SEQ ID 3293, SEQ ID 3294, SEQ ID 3295, SEQ ID 3296, SEQ ID 3297, SEQ ID 3298, SEQ ID 3299, SEQ ID 3300, SEQ ID 3301, SEQ ID 3302, SEQ ID 3303, SEQ ID 3304, SEQ ID 3305, SEQ ID 3306, SEQ ID 3307, SEQ ID 3308, SEQ ID 3309, SEQ ID 3310, SEQ ID 3311, SEQ ID 3312, SEQ ID 3313, SEQ ID 3314, SEQ ID 3315, SEQ ID 3316, SEQ ID 3317, SEQ ID 3318, SEQ ID 3320, SEQ ID 3321, SEQ ID 3322, SEQ ID 3323, SEQ ID 3324, SEQ ID 3325, SEQ ID 3326, SEQ ID 3327, SEQ ID 3329, SEQ ID 3331, SEQ ID 3332, SEQ ID 3333, SEQ ID 3334, SEQ ID 3335, SEQ ID 3336, SEQ ID 3337, SEQ ID 3338, SEQ ID 3339, SEQ ID 3340, SEQ ID 3342, SEQ ID 3343, SEQ ID 3344, SEQ ID 3345, SEQ ID 3346, SEQ ID 3347, SEQ ID 3348, SEQ ID 3349, SEQ ID 3350, SEQ ID 3351, SEQ ID 3352, SEQ ID 3353, SEQ ID 3354, SEQ ID 3355, SEQ ID 3356, SEQ ID 3357, SEQ ID 3358, SEQ ID 3359, SEQ ID 3360, SEQ ID 3361, SEQ ID 3362, SEQ ID 3363, SEQ ID 3364, SEQ ID 3365, SEQ ID 3366, SEQ ID 3367, SEQ ID 3368, SEQ ID 3369, SEQ ID 3370, SEQ ID 3371, SEQ ID 3390, SEQ ID 3391, SEQ ID 3392, SEQ ID 3393, SEQ ID 3394, SEQ ID 3395, SEQ ID 3396, SEQ ID 3397, SEQ ID 3398, SEQ ID 3399, SEQ ID 3400, SEQ ID 3401, SEQ ID 3402, SEQ ID 3403, SEQ ID 3404, SEQ ID 3405, SEQ ID 3406, SEQ ID 3407, SEQ ID 3408, SEQ ID 3409, SEQ ID 3410, SEQ ID 3411, SEQ ID 3412, SEQ ID 3413, SEQ ID 3414, SEQ ID 3415, SEQ ID 3416, SEQ ID 3417, SEQ ID 3418, SEQ ID 3419, SEQ ID 3420, SEQ ID 3421, SEQ ID 3422, SEQ ID 3423, SEQ ID 3424, SEQ ID 3425, SEQ ID 3426, SEQ ID 3427, SEQ ID 3428, SEQ ID 3429, SEQ ID 3430, SEQ ID 3431, SEQ ID 3432, SEQ ID 3433, SEQ ID 3434, SEQ ID 3435, SEQ ID 3436, SEQ ID 3437, SEQ ID 3438, SEQ ID 3439, SEQ ID 3440, SEQ ID 3441, SEQ ID 3442, SEQ ID 3443, SEQ ID 3444, SEQ ID 3445, SEQ ID 3446, SEQ ID 3447, SEQ ID 3448, SEQ ID 3449, SEQ ID 3450, SEQ ID 3451, SEQ ID 3452, SEQ ID 3453, SEQ ID 3454, SEQ ID 3460, SEQ ID 3461, SEQ ID 3464, SEQ ID 3465, SEQ ID 3466, SEQ ID 3467, SEQ ID 3468, SEQ ID 3486, SEQ ID 3487, SEQ ID 3488, SEQ ID 3489, SEQ ID 3490, SEQ ID 3491, SEQ ID 3493, SEQ ID 3494, SEQ ID 3496, SEQ ID 3497, SEQ ID 3501, SEQ ID 3505, SEQ ID 3508, SEQ ID 3511, SEQ ID 3512, SEQ ID 3516, SEQ ID 3517, SEQ ID 3518, SEQ ID 3521, SEQ ID 3522, SEQ ID 3523, SEQ ID 3524, SEQ ID 3525, SEQ ID 3526, SEQ ID 3527, SEQ ID 3528, SEQ ID 3530, SEQ ID 3531, SEQ ID 3532, SEQ ID 3534, SEQ ID 3535, SEQ ID 3536, SEQ ID 3538, SEQ ID 3539, SEQ ID 3541, SEQ ID 3542, SEQ ID 3543, SEQ ID 3544, SEQ ID 3546, SEQ ID 3548, SEQ ID 3549, SEQ ID 3550, SEQ ID 3552, SEQ ID 3556, SEQ ID 3557, SEQ ID 3558, SEQ ID 3560, SEQ ID 3561, SEQ ID 3566, SEQ ID 3567, SEQ ID 3568, SEQ ID 3569, SEQ ID 3571, SEQ ID 3572, SEQ ID 3573, SEQ ID 3574, SEQ ID 3576, SEQ ID 3577, SEQ ID 3578, SEQ ID 3580, SEQ ID 3581, SEQ ID 3584, SEQ ID 3585, SEQ ID 3586, SEQ ID 3588, SEQ ID 3590, SEQ ID 3592, SEQ ID 3594, SEQ ID 3595, SEQ ID 3598, SEQ ID 3599, SEQ ID 3600, SEQ ID 3601, SEQ ID 3602, SEQ ID 3603, SEQ ID 3605, SEQ ID 3607, SEQ ID 3609, SEQ ID 3610, SEQ ID 3613, SEQ ID 3614, SEQ ID 3615, SEQ ID 3616, SEQ ID 3617, SEQ ID 3621, SEQ ID 3623, SEQ ID 3624, SEQ ID 3625, SEQ ID 3626, SEQ ID 3627, SEQ ID 3628, SEQ ID 3629, SEQ ID 3630, SEQ ID 3631, SEQ ID 3632, SEQ ID 3633, SEQ ID 3636, SEQ ID 3637, SEQ ID 3638, SEQ ID 3639, SEQ ID 3641, SEQ ID 3642, SEQ ID 3643, SEQ ID 3645, SEQ ID 3647, SEQ ID 3648, SEQ ID 3649, SEQ ID 3651, SEQ ID 3654, SEQ ID 3656, SEQ ID 3659, SEQ ID 3660, SEQ ID 3661, SEQ ID 3663, SEQ ID 3664, SEQ ID 3665, SEQ ID 3666, SEQ ID 3670, SEQ ID 3672, SEQ ID 3676, SEQ ID 3678, SEQ ID 3679, SEQ ID 3680, SEQ ID 3681, SEQ ID 3682, SEQ ID 3683, SEQ ID 3684, SEQ ID 3685, SEQ ID 3686, SEQ ID 3687, SEQ ID 3688, SEQ ID 3689, SEQ ID 3690, SEQ ID 3691, SEQ ID 3692, SEQ ID 3693, SEQ ID 3694, SEQ ID 3695, SEQ ID 3696, SEQ ID 3697, SEQ ID 3698, SEQ ID 3699, SEQ ID 3700, SEQ ID 3701, SEQ ID 3702, SEQ ID 3703, SEQ ID 3704, SEQ ID 3705, SEQ ID 3706, SEQ ID 3707, SEQ ID 3708, SEQ ID 3709, SEQ ID 3710, SEQ ID 3711, SEQ ID 3712, SEQ ID 3713, SEQ ID 3714, SEQ ID 3715, SEQ ID 3716, SEQ ID 3717, SEQ ID 3718, SEQ ID 3719, SEQ ID 3720, SEQ ID 3721, SEQ ID 3722, SEQ ID 3723, SEQ ID 3724, SEQ ID 3725, SEQ ID 3726, SEQ ID 3727, SEQ ID 3729, SEQ ID 3730, SEQ ID 3731, SEQ ID 3732, SEQ ID 3733, SEQ ID 3734, SEQ ID 3735, SEQ ID 3736, SEQ ID 3737, SEQ ID 3738, SEQ ID 3739, SEQ ID 3740, SEQ ID 3741, SEQ ID 3742, SEQ ID 3743, SEQ ID 3744, SEQ ID 3745, SEQ ID 3746, SEQ ID 3747, SEQ ID 3748, SEQ ID 3749, SEQ ID 3750, SEQ ID 3751, SEQ ID 3752, SEQ ID 3753, SEQ ID 3754, SEQ ID 3755, SEQ ID 3774, SEQ ID 3775, SEQ ID 3776, SEQ ID 3777, SEQ ID 3778, SEQ ID 3779, SEQ ID 3780, SEQ ID 3781, SEQ ID 3782, SEQ ID 3783, SEQ ID 3784, SEQ ID 3785, SEQ ID 3786, SEQ ID 3787, SEQ ID 3788, SEQ ID 3789, SEQ ID 3790, SEQ ID 3791, SEQ ID 3792, SEQ ID 3793, SEQ ID 3794, SEQ ID 3795, SEQ ID 3796, SEQ ID 3797, SEQ ID 3798, SEQ ID 3799, SEQ ID 3800, SEQ ID 3801, SEQ ID 3802, SEQ ID 3803, SEQ ID 3804, SEQ ID 3805, SEQ ID 3806, SEQ ID 3807, SEQ ID 3808, SEQ ID 3809, SEQ ID 3810, SEQ ID 3811, SEQ ID 3812, SEQ ID 3813, SEQ ID 3814, SEQ ID 3815, SEQ ID 3816, SEQ ID 3817, SEQ ID 3818, SEQ ID 3819, SEQ ID 3820, SEQ ID 3821, SEQ ID 3822, SEQ ID 3823, SEQ ID 3824, SEQ ID 3825, SEQ ID 3826, SEQ ID 3827, SEQ ID 3828, SEQ ID 3829, SEQ ID 3830, SEQ ID 3831, SEQ ID 3832, SEQ ID 3833, SEQ ID 3834, SEQ ID 3835, SEQ ID 3836, SEQ ID 3837, SEQ ID 3838, SEQ ID 3839, SEQ ID 3840, SEQ ID 3841, SEQ ID 3842, SEQ ID 3844, SEQ ID 3848, SEQ ID 3850, SEQ ID 3851, SEQ ID 3852, SEQ ID 3853, SEQ ID 3867, SEQ ID 3868, SEQ ID 3869, SEQ ID 3870, SEQ ID 3871, SEQ ID 3872, SEQ ID 3873, SEQ ID 3874, SEQ ID 3875, SEQ ID 3876, SEQ ID 3877, SEQ ID 3878, SEQ ID 3879, SEQ ID 3880, SEQ ID 3881, SEQ ID 3882, SEQ ID 3883, SEQ ID 3884, SEQ ID 3885, SEQ ID 3886, SEQ ID 3887, SEQ ID 3888, SEQ ID 3889, SEQ ID 3890, SEQ ID 3891, SEQ ID 3892, SEQ ID 3893, SEQ ID 3894, SEQ ID 3895, SEQ ID 3896, SEQ ID 3897, SEQ ID 3898, SEQ ID 3899, SEQ ID 3900, SEQ ID 3901, SEQ ID 3902, SEQ ID 3903, SEQ ID 3904, SEQ ID 3905, SEQ ID 3906, SEQ ID 3907, SEQ ID 3908, SEQ ID 3909, SEQ ID 3910, SEQ ID 3911, SEQ ID 3912, SEQ ID 3913, SEQ ID 3914, SEQ ID 3915, SEQ ID 3916, SEQ ID 3917, SEQ ID 3918, SEQ ID 3919, SEQ ID 3920, SEQ ID 3921, SEQ ID 3922, SEQ ID 3923, SEQ ID 3924, SEQ ID 3925, SEQ ID 3926, SEQ ID 3927, SEQ ID 3928, SEQ ID 3929, SEQ ID 3930, SEQ ID 3931, SEQ ID 3932, SEQ ID 3933, SEQ ID 3934, SEQ ID 3935, SEQ ID 3936, SEQ ID 3937, SEQ ID 3938, SEQ ID 3939, SEQ ID 3940, SEQ ID 3941, SEQ ID 3942, SEQ ID 3943, SEQ ID 3944, SEQ ID 3945, SEQ ID 3946, SEQ ID 3947, and SEQ ID 3948, or at least 8, 9, 10, 11, 12, 13, 14, 15 or 16 contiguous nucleotides thereof.

[0070] In some embodiments, the contiguous nucleotide sequence is complementary, such as fully complementary, to a sequence selected from the group consisting of SEQ ID 2321, SEQ ID 2335, SEQ ID 2336, SEQ ID 2337, SEQ ID 2338, SEQ ID 2339, SEQ ID 2348, SEQ ID 2349, SEQ ID 2351, SEQ ID 2352, SEQ ID 2353, SEQ ID 2354, SEQ ID 2355, SEQ ID 2358, SEQ ID 2360, SEQ ID 2364, SEQ ID 2365, SEQ ID 2366, SEQ ID 2367, SEQ ID 2369, SEQ ID 2371, SEQ ID 2373, SEQ ID 2375, SEQ ID 2386, SEQ ID 2387, SEQ ID 2388, SEQ ID 2389, SEQ ID 2394, SEQ ID 2403, SEQ ID 2426, SEQ ID 2428, SEQ ID 2429, SEQ ID 2430, SEQ ID 2431, SEQ ID 2432, SEQ ID 2435, SEQ ID 2440, SEQ ID 2441, SEQ ID 2442, SEQ ID 2444, SEQ ID 2446, SEQ ID 2447, SEQ ID 2450, SEQ ID 2451, SEQ ID 2452, SEQ ID 2453, SEQ ID 2454, SEQ ID 2455, SEQ ID 2456, SEQ ID 2458, SEQ ID 2459, SEQ ID 2461, SEQ ID 2463, SEQ ID 2464, SEQ ID 2465, SEQ ID 2466, SEQ ID 2467, SEQ ID 2468, SEQ ID 2469, SEQ ID 2470, SEQ ID 2471, SEQ ID 2472, SEQ ID 2473, SEQ ID 2474, SEQ ID 2475, SEQ ID 2476, SEQ ID 2477, SEQ ID 2478, SEQ ID 2482, SEQ ID 2483, SEQ ID 2484, SEQ ID 2485, SEQ ID 2487, SEQ ID 2489, SEQ ID 2494, SEQ ID 2495, SEQ ID 2496, SEQ ID 2497, SEQ ID 2499, SEQ ID 2501, SEQ ID 2502, SEQ ID 2504, SEQ ID 2506, SEQ ID 2507, SEQ ID 2508, SEQ ID 2509, SEQ ID 2511, SEQ ID 2513, SEQ ID 2515, SEQ ID 2516, SEQ ID 2518, SEQ ID 2519, SEQ ID 2520, SEQ ID 2521, SEQ ID 2523, SEQ ID 2525, SEQ ID 2534, SEQ ID 2537, SEQ ID 2544, SEQ ID 2546, SEQ ID 2554, SEQ ID 2555, SEQ ID 2556, SEQ ID 2560, SEQ ID 2561, SEQ ID 2562, SEQ ID 2595, SEQ ID 2626, SEQ ID 2628, SEQ ID 2629, SEQ ID 2630, SEQ ID 2631, SEQ ID 2633, SEQ ID 2638, SEQ ID 2639, SEQ ID 2640, SEQ ID 2649, SEQ ID 2651, SEQ ID 2652, SEQ ID 2655, SEQ ID 2658, SEQ ID 2665, SEQ ID 2666, SEQ ID 2667, SEQ ID 2669, SEQ ID 2670, SEQ ID 2676, SEQ ID 2677, SEQ ID 2678, SEQ ID 2679, SEQ ID 2682, SEQ ID 2686, SEQ ID 2688, SEQ ID 2689, SEQ ID 2691, SEQ ID 2694, SEQ ID 2698, SEQ ID 2699, SEQ ID 2700, SEQ ID 2701, SEQ ID 2703, SEQ ID 2706, SEQ ID 2709, SEQ ID 2711, SEQ ID 2712, SEQ ID 2713, SEQ ID 2714, SEQ ID 2719, SEQ ID 2720, SEQ ID 2721, SEQ ID 2737, SEQ ID 2739, SEQ ID 2740, SEQ ID 2741, SEQ ID 2742, SEQ ID 2743, SEQ ID 2744, SEQ ID 2745, SEQ ID 2746, SEQ ID 2747, SEQ ID 2748, SEQ ID 2749, SEQ ID 2750, SEQ ID 2751, SEQ ID 2752, SEQ ID 2753, SEQ ID 2754, SEQ ID 2755, SEQ ID 2756, SEQ ID 2757, SEQ ID 2758, SEQ ID 2760, SEQ ID 2763, SEQ ID 2764, SEQ ID 2765, SEQ ID 2766, SEQ ID 2767, SEQ ID 2768, SEQ ID 2769, SEQ ID 2770, SEQ ID 2771, SEQ ID 2772, SEQ ID 2774, SEQ ID 2816, SEQ ID 2817, SEQ ID 2818, SEQ ID 2819, SEQ ID 2820, SEQ ID 2824, SEQ ID 2828, SEQ ID 2829, SEQ ID 2830, SEQ ID 2831, SEQ ID 2832, SEQ ID 2833, SEQ ID 2834, SEQ ID 2835, SEQ ID 2836, SEQ ID 2837, SEQ ID 2851, SEQ ID 2852, SEQ ID 2866, SEQ ID 2871, SEQ ID 2872, SEQ ID 2886, SEQ ID 2887, SEQ ID 2890, SEQ ID 2891, SEQ ID 2892, SEQ ID 2895, SEQ ID 2896, SEQ ID 2899, SEQ ID 2904, SEQ ID 2910, SEQ ID 2911, SEQ ID 2912, SEQ ID 2913, SEQ ID 2914, SEQ ID 2916, SEQ ID 2918, SEQ ID 2919, SEQ ID 2920, SEQ ID 2922, SEQ ID 2925, SEQ ID 2926, SEQ ID 2932, SEQ ID 2939, SEQ ID 2941, SEQ ID 2942, SEQ ID 2943, SEQ ID 2972, SEQ ID 2973, SEQ ID 2974, SEQ ID 2975, SEQ ID 2976, SEQ ID 2977, SEQ ID 2980, SEQ ID 2983, SEQ ID 2985, SEQ ID 3053, SEQ ID 3054, SEQ ID 3055, SEQ ID 3056, SEQ ID 3058, SEQ ID 3059, SEQ ID 3060, SEQ ID 3061, SEQ ID 3062, SEQ ID 3063, SEQ ID 3064, SEQ ID 3065, SEQ ID 3066, SEQ ID 3068, SEQ ID 3069, SEQ ID 3070, SEQ ID 3071, SEQ ID 3072, SEQ ID 3073, SEQ ID 3074, SEQ ID 3075, SEQ ID 3076, SEQ ID 3077, SEQ ID 3078, SEQ ID 3079, SEQ ID 3082, SEQ ID 3083, SEQ ID 3084, SEQ ID 3085, SEQ ID 3088, SEQ ID 3089, SEQ ID 3090, SEQ ID 3091, SEQ ID 3092, SEQ ID 3095, SEQ ID 3097, SEQ ID 3102, SEQ ID 3106, SEQ ID 3108, SEQ ID 3110, SEQ ID 3116, SEQ ID 3120, SEQ ID 3121, SEQ ID 3125, SEQ ID 3126, SEQ ID 3133, SEQ ID 3134, SEQ ID 3135, SEQ ID 3137, SEQ ID 3138, SEQ ID 3140, SEQ ID 3141, SEQ ID 3142, SEQ ID 3143, SEQ ID 3145, SEQ ID 3148, SEQ ID 3152, SEQ ID 3153, SEQ ID 3156, SEQ ID 3157, SEQ ID 3158, SEQ ID 3159, SEQ ID 3160, SEQ ID 3161, SEQ ID 3162, SEQ ID 3163, SEQ ID 3164, SEQ ID 3165, SEQ ID 3166, SEQ ID 3167, SEQ ID 3168, SEQ ID 3169, SEQ ID 3170, SEQ ID 3172, SEQ ID 3173, SEQ ID 3174, SEQ ID 3175, SEQ ID 3176, SEQ ID 3177, SEQ ID 3178, SEQ ID 3179, SEQ ID 3180, SEQ ID 3181, SEQ ID 3182, SEQ ID 3183, SEQ ID 3184, SEQ ID 3186, SEQ ID 3188, SEQ ID 3191, SEQ ID 3193, SEQ ID 3196, SEQ ID 3197, SEQ ID 3203, SEQ ID 3205, SEQ ID 3206, SEQ ID 3207, SEQ ID 3210, SEQ ID 3211, SEQ ID 3212, SEQ ID 3213, SEQ ID 3214, SEQ ID 3215, SEQ ID 3216, SEQ ID 3217, SEQ ID 3218, SEQ ID 3219, SEQ ID 3221, SEQ ID 3222, SEQ ID 3223, SEQ ID 3224, SEQ ID 3227, SEQ ID 3236, SEQ ID 3237, SEQ ID 3238, SEQ ID 3239, SEQ ID 3240, SEQ ID 3241, SEQ ID 3242, SEQ ID 3243, SEQ ID 3244, SEQ ID 3245, SEQ ID 3246, SEQ ID 3248, SEQ ID 3249, SEQ ID 3250, SEQ ID 3251, SEQ ID 3252, SEQ ID 3254, SEQ ID 3258, SEQ ID 3259, SEQ ID 3261, SEQ ID 3263, SEQ ID 3265, SEQ ID 3266, SEQ ID 3267, SEQ ID 3271, SEQ ID 3272, SEQ ID 3273, SEQ ID 3276, SEQ ID 3277, SEQ ID 3279, SEQ ID 3286, SEQ ID 3295, SEQ ID 3297, SEQ ID 3305, SEQ ID 3307, SEQ ID 3309, SEQ ID 3312, SEQ ID 3313, SEQ ID 3314, SEQ ID 3316, SEQ ID 3317, SEQ ID 3318, SEQ ID 3320, SEQ ID 3332, SEQ ID 3335, SEQ ID 3336, SEQ ID 3337, SEQ ID 3338, SEQ ID 3339, SEQ ID 3340, SEQ ID 3342, SEQ ID 3343, SEQ ID 3345, SEQ ID 3346, SEQ ID 3347, SEQ ID 3348, SEQ ID 3349, SEQ ID 3350, SEQ ID 3351, SEQ ID 3352, SEQ ID 3353, SEQ ID 3354, SEQ ID 3355, SEQ ID 3356, SEQ ID 3359, SEQ ID 3360, SEQ ID 3361, SEQ ID 3362, SEQ ID 3363, SEQ ID 3364, SEQ ID 3365, SEQ ID 3366, SEQ ID 3369, SEQ ID 3370, SEQ ID 3390, SEQ ID 3392, SEQ ID 3393, SEQ ID 3394, SEQ ID 3395, SEQ ID 3396, SEQ ID 3397, SEQ ID 3398, SEQ ID 3399, SEQ ID 3401, SEQ ID 3403, SEQ ID 3404, SEQ ID 3407, SEQ ID 3408, SEQ ID 3409, SEQ ID 3410, SEQ ID 3411, SEQ ID 3412, SEQ ID 3413, SEQ ID 3414, SEQ ID 3415, SEQ ID 3417, SEQ ID 3419, SEQ ID 3420, SEQ ID 3422, SEQ ID 3423, SEQ ID 3424, SEQ ID 3428, SEQ ID 3429, SEQ ID 3430, SEQ ID 3432, SEQ ID 3433, SEQ ID 3434, SEQ ID 3435, SEQ ID 3436, SEQ ID 3437, SEQ ID 3439, SEQ ID 3440, SEQ ID 3441, SEQ ID 3442, SEQ ID 3443, SEQ ID 3444, SEQ ID 3445, SEQ ID 3446, SEQ ID 3447, SEQ ID 3448, SEQ ID 3449, SEQ ID 3450, SEQ ID 3451, SEQ ID 3452, SEQ ID 3460, SEQ ID 3461, SEQ ID 3466, SEQ ID 3467, SEQ ID 3468, SEQ ID 3490, SEQ ID 3494, SEQ ID 3496, SEQ ID 3501, SEQ ID 3505, SEQ ID 3511, SEQ ID 3512, SEQ ID 3516, SEQ ID 3517, SEQ ID 3521, SEQ ID 3522, SEQ ID 3556, SEQ ID 3557, SEQ ID 3561, SEQ ID 3566, SEQ ID 3567, SEQ ID 3568, SEQ ID 3569, SEQ ID 3571, SEQ ID 3572, SEQ ID 3576, SEQ ID 3578, SEQ ID 3580, SEQ ID 3584, SEQ ID 3594, SEQ ID 3613, SEQ ID 3614, SEQ ID 3624, SEQ ID 3625, SEQ ID 3626, SEQ ID 3627, SEQ ID 3628, SEQ ID 3633, SEQ ID 3641, SEQ ID 3643, SEQ ID 3648, SEQ ID 3651, SEQ ID 3654, SEQ ID 3656, SEQ ID 3659, SEQ ID 3660, SEQ ID 3661, SEQ ID 3670, SEQ ID 3676, SEQ ID 3680, SEQ ID 3681, SEQ ID 3683, SEQ ID 3684, SEQ ID 3685, SEQ ID 3686, SEQ ID 3687, SEQ ID 3688, SEQ ID 3689, SEQ ID 3691, SEQ ID 3693, SEQ ID 3694, SEQ ID 3695, SEQ ID 3696, SEQ ID 3698, SEQ ID 3700, SEQ ID 3701, SEQ ID 3703, SEQ ID 3704, SEQ ID 3707, SEQ ID 3708, SEQ ID 3709, SEQ ID 3710, SEQ ID 3711, SEQ ID 3712, SEQ ID 3713, SEQ ID 3714, SEQ ID 3715, SEQ ID 3716, SEQ ID 3717, SEQ ID 3718, SEQ ID 3719, SEQ ID 3720, SEQ ID 3721, SEQ ID 3722, SEQ ID 3723, SEQ ID 3725, SEQ ID 3744, SEQ ID 3747, SEQ ID 3748, SEQ ID 3749, SEQ ID 3750, SEQ ID 3751, SEQ ID 3752, SEQ ID 3753, SEQ ID 3754, SEQ ID 3755, SEQ ID 3774, SEQ ID 3775, SEQ ID 3776, SEQ ID 3786, SEQ ID 3788, SEQ ID 3790, SEQ ID 3791, SEQ ID 3793, SEQ ID 3794, SEQ ID 3795, SEQ ID 3796, SEQ ID 3797, SEQ ID 3798, SEQ ID 3799, SEQ ID 3800, SEQ ID 3801, SEQ ID 3802, SEQ ID 3803, SEQ ID 3804, SEQ ID 3805, SEQ ID 3809, SEQ ID 3810, SEQ ID 3811, SEQ ID 3812, SEQ ID 3813, SEQ ID 3814, SEQ ID 3815, SEQ ID 3821, SEQ ID 3822, SEQ ID 3823, SEQ ID 3824, SEQ ID 3825, SEQ ID 3826, SEQ ID 3827, SEQ ID 3828, SEQ ID 3830, SEQ ID 3831, SEQ ID 3832, SEQ ID 3834, SEQ ID 3836, SEQ ID 3837, SEQ ID 3838, SEQ ID 3839, SEQ ID 3840, SEQ ID 3841, SEQ ID 3842, SEQ ID 3844, SEQ ID 3850, SEQ ID 3852, SEQ ID 3867, SEQ ID 3868, SEQ ID 3870, SEQ ID 3871, SEQ ID 3872, SEQ ID 3873, SEQ ID 3874, SEQ ID 3875, SEQ ID 3876, SEQ ID 3879, SEQ ID 3880, SEQ ID 3881, SEQ ID 3882, SEQ ID 3883, SEQ ID 3884, SEQ ID 3885, SEQ ID 3886, SEQ ID 3887, SEQ ID 3888, SEQ ID 3889, SEQ ID 3890, SEQ ID 3891, SEQ ID 3892, SEQ ID 3893, SEQ ID 3894, SEQ ID 3895, SEQ ID 3896, SEQ ID 3897, SEQ ID 3908, SEQ ID 3909, SEQ ID 3910, SEQ ID 3911, SEQ ID 3912, SEQ ID 3913, SEQ ID 3922, SEQ ID 3923, SEQ ID 3930, SEQ ID 3935, SEQ ID 3936, SEQ ID 3937, SEQ ID 3938, SEQ ID 3939, SEQ ID 3940, SEQ ID 3944, SEQ ID 3945, SEQ ID 3946, SEQ ID 3947, and SEQ ID 3948, or at least 8, 9, 10, 11, 12, 13, 14, 15 or 16 contiguous nucleotides thereof.

[0071] In some embodiments the contiguous nucleotide sequence is complementary, such as fully complementary, to at least 8 contiguous nucleotides of any of the target sequences recited herein.

[0072] In some embodiments the contiguous nucleotide sequence is complementary, such as fully complementary, to at least 9 contiguous nucleotides of any of the target sequences recited herein.

[0073] In some embodiments the contiguous nucleotide sequence is complementary, such as fully complementary, to at least 10 contiguous nucleotides contiguous nucleotides of any of the target sequences recited herein.

[0074] In some embodiments the contiguous nucleotide sequence is complementary, such as fully complementary, to at least 11 contiguous nucleotides contiguous nucleotides of any of the target sequences recited herein.

[0075] In some embodiments the contiguous nucleotide sequence is complementary, such as fully complementary, to at least 12 contiguous nucleotides contiguous nucleotides of any of the target sequences recited herein.

[0076] In some embodiments the contiguous nucleotide sequence is complementary, such as fully complementary, to at least 13 contiguous nucleotides contiguous nucleotides of any of the target sequences recited herein.

[0077] In some embodiments the contiguous nucleotide sequence is complementary, such as fully complementary, to at least 14 contiguous nucleotides contiguous nucleotides of any of the target sequences recited herein.

[0078] In some embodiments the contiguous nucleotide sequence is complementary, such as fully complementary, to at least 15 contiguous nucleotides contiguous nucleotides of any of the target sequences recited herein.

[0079] In some embodiments the contiguous nucleotide sequence is complementary, such as fully complementary, to at least 16 contiguous nucleotides contiguous nucleotides of any of the target sequences recited herein.

[0080] In some embodiments, the antisense oligonucleotide progranulin agonist is or comprises an antisense oligonucleotide mixmer or totalmer. In some embodiments, the contiguous nucleotide sequence is a mixmer or a totalmer.

[0081] In some embodiments, the antisense oligonucleotide progranulin agonist or contiguous nucleotide sequence thereof is 10-20 nucleotides in length.

[0082] In some embodiments, the antisense oligonucleotide progranulin agonist is selected from the group consisting of SEQ ID NOs 3-342.

[0083] In some embodiments, the antisense oligonucleotide progranulin agonist is selected from the group consisting of SEQ ID NOs 693-2039.

[0084] In some embodiments, the antisense oligonucleotide progranulin agonist is selected from the group consisting of SEQ ID 693, SEQ ID 694, SEQ ID 696, SEQ ID 700, SEQ ID 701, SEQ ID 703, SEQ ID 706, SEQ ID 707, SEQ ID 708, SEQ ID 709, SEQ ID 710, SEQ ID 711, SEQ ID 712, SEQ ID 713, SEQ ID 714, SEQ ID 717, SEQ ID 718, SEQ ID 719, SEQ ID 720, SEQ ID 721, SEQ ID 722, SEQ ID 723, SEQ ID 724, SEQ ID 725, SEQ ID 726, SEQ ID 727, SEQ ID 728, SEQ ID 729, SEQ ID 730, SEQ ID 731, SEQ ID 732, SEQ ID 733, SEQ ID 734, SEQ ID 736, SEQ ID 737, SEQ ID 738, SEQ ID 739, SEQ ID 740, SEQ ID 741, SEQ ID 742, SEQ ID 743, SEQ ID 744, SEQ ID 745, SEQ ID 746, SEQ ID 747, SEQ ID 748, SEQ ID 749, SEQ ID 750, SEQ ID 751, SEQ ID 752, SEQ ID 753, SEQ ID 756, SEQ ID 758, SEQ ID 759, SEQ ID 760, SEQ ID 761, SEQ ID 762, SEQ ID 764, SEQ ID 765, SEQ ID 766, SEQ ID 767, SEQ ID 768, SEQ ID 769, SEQ ID 770, SEQ ID 771, SEQ ID 772, SEQ ID 773, SEQ ID 775, SEQ ID 776, SEQ ID 777, SEQ ID 778, SEQ ID 779, SEQ ID 780, SEQ ID 782, SEQ ID 783, SEQ ID 785, SEQ ID 786, SEQ ID 787, SEQ ID 788, SEQ ID 790, SEQ ID 791, SEQ ID 793, SEQ ID 796, SEQ ID 797, SEQ ID 798, SEQ ID 799, SEQ ID 800, SEQ ID 801, SEQ ID 802, SEQ ID 803, SEQ ID 804, SEQ ID 805, SEQ ID 806, SEQ ID 807, SEQ ID 808, SEQ ID 809, SEQ ID 810, SEQ ID 811, SEQ ID 812, SEQ ID 813, SEQ ID 814, SEQ ID 815, SEQ ID 816, SEQ ID 817, SEQ ID 818, SEQ ID 819, SEQ ID 820, SEQ ID 821, SEQ ID 822, SEQ ID 823, SEQ ID 824, SEQ ID 825, SEQ ID 826, SEQ ID 827, SEQ ID 828, SEQ ID 829, SEQ ID 830, SEQ ID 831, SEQ ID 832, SEQ ID 833, SEQ ID 834, SEQ ID 835, SEQ ID 836, SEQ ID 837, SEQ ID 838, SEQ ID 839, SEQ ID 840, SEQ ID 841, SEQ ID 842, SEQ ID 843, SEQ ID 844, SEQ ID 845, SEQ ID 846, SEQ ID 847, SEQ ID 848, SEQ ID 849, SEQ ID 850, SEQ ID 851, SEQ ID 853, SEQ ID 854, SEQ ID 855, SEQ ID 856, SEQ ID 857, SEQ ID 859, SEQ ID 861, SEQ ID 862, SEQ ID 863, SEQ ID 864, SEQ ID 865, SEQ ID 866, SEQ ID 867, SEQ ID 868, SEQ ID 869, SEQ ID 870, SEQ ID 871, SEQ ID 873, SEQ ID 874, SEQ ID 875, SEQ ID 876, SEQ ID 877, SEQ ID 878, SEQ ID 879, SEQ ID 880, SEQ ID 881, SEQ ID 882, SEQ ID 883, SEQ ID 884, SEQ ID 885, SEQ ID 886, SEQ ID 887, SEQ ID 888, SEQ ID 890, SEQ ID 891, SEQ ID 892, SEQ ID 893, SEQ ID 894, SEQ ID 895, SEQ ID 896, SEQ ID 897, SEQ ID 898, SEQ ID 899, SEQ ID 900, SEQ ID 903, SEQ ID 905, SEQ ID 906, SEQ ID 907, SEQ ID 908, SEQ ID 909, SEQ ID 910, SEQ ID 912, SEQ ID 913, SEQ ID 914, SEQ ID 916, SEQ ID 918, SEQ ID 919, SEQ ID 921, SEQ ID 922, SEQ ID 923, SEQ ID 925, SEQ ID 926, SEQ ID 927, SEQ ID 928, SEQ ID 929, SEQ ID 932, SEQ ID 933, SEQ ID 934, SEQ ID 935, SEQ ID 937, SEQ ID 938, SEQ ID 939, SEQ ID 944, SEQ ID 945, SEQ ID 946, SEQ ID 947, SEQ ID 948, SEQ ID 949, SEQ ID 950, SEQ ID 951, SEQ ID 952, SEQ ID 953, SEQ ID 954, SEQ ID 955, SEQ ID 956, SEQ ID 957, SEQ ID 958, SEQ ID 960, SEQ ID 961, SEQ ID 962, SEQ ID 963, SEQ ID 964, SEQ ID 965, SEQ ID 966, SEQ ID 967, SEQ ID 968, SEQ ID 969, SEQ ID 970, SEQ ID 971, SEQ ID 973, SEQ ID 974, SEQ ID 975, SEQ ID 976, SEQ ID 978, SEQ ID 982, SEQ ID 985, SEQ ID 986, SEQ ID 987, SEQ ID 991, SEQ ID 994, SEQ ID 995, SEQ ID 996, SEQ ID 997, SEQ ID 998, SEQ ID 999, SEQ ID 1000, SEQ ID 1001, SEQ ID 1002, SEQ ID 1003, SEQ ID 1004, SEQ ID 1005, SEQ ID 1006, SEQ ID 1007, SEQ ID 1008, SEQ ID 1009, SEQ ID 1010, SEQ ID 1011, SEQ ID 1012, SEQ ID 1013, SEQ ID 1014, SEQ ID 1015, SEQ ID 1016, SEQ ID 1017, SEQ ID 1018, SEQ ID 1019, SEQ ID 1020, SEQ ID 1021, SEQ ID 1022, SEQ ID 1023, SEQ ID 1024, SEQ ID 1025, SEQ ID 1026, SEQ ID 1027, SEQ ID 1028, SEQ ID 1030, SEQ ID 1031, SEQ ID 1032, SEQ ID 1033, SEQ ID 1034, SEQ ID 1035, SEQ ID 1036, SEQ ID 1037, SEQ ID 1038, SEQ ID 1039, SEQ ID 1040, SEQ ID 1041, SEQ ID 1042, SEQ ID 1043, SEQ ID 1044, SEQ ID 1045, SEQ ID 1046, SEQ ID 1047, SEQ ID 1048, SEQ ID 1049, SEQ ID 1050, SEQ ID 1051, SEQ ID 1052, SEQ ID 1053, SEQ ID 1054, SEQ ID 1055, SEQ ID 1056, SEQ ID 1057, SEQ ID 1058, SEQ ID 1059, SEQ ID 1060, SEQ ID 1061, SEQ ID 1062, SEQ ID 1063, SEQ ID 1065, SEQ ID 1066, SEQ ID 1067, SEQ ID 1068, SEQ ID 1069, SEQ ID 1070, SEQ ID 1071, SEQ ID 1072, SEQ ID 1073, SEQ ID 1074, SEQ ID 1075, SEQ ID 1076, SEQ ID 1077, SEQ ID 1078, SEQ ID 1079, SEQ ID 1080, SEQ ID 1081, SEQ ID 1082, SEQ ID 1083, SEQ ID 1084, SEQ ID 1085, SEQ ID 1086, SEQ ID 1087, SEQ ID 1088, SEQ ID 1089, SEQ ID 1090, SEQ ID 1091, SEQ ID 1092, SEQ ID 1093, SEQ ID 1094, SEQ ID 1095, SEQ ID 1098, SEQ ID 1099, SEQ ID 1100, SEQ ID 1101, SEQ ID 1102, SEQ ID 1105, SEQ ID 1106, SEQ ID 1107, SEQ ID 1108, SEQ ID 1109, SEQ ID 1110, SEQ ID 1111, SEQ ID 1112, SEQ ID 1113, SEQ ID 1114, SEQ ID 1115, SEQ ID 1116, SEQ ID 1117, SEQ ID 1118, SEQ ID 1119, SEQ ID 1120, SEQ ID 1121, SEQ ID 1122, SEQ ID 1123, SEQ ID 1124, SEQ ID 1125, SEQ ID 1126, SEQ ID 1127, SEQ ID 1128, SEQ ID 1129, SEQ ID 1130, SEQ ID 1131, SEQ ID 1132, SEQ ID 1133, SEQ ID 1134, SEQ ID 1135, SEQ ID 1136, SEQ ID 1137, SEQ ID 1138, SEQ ID 1139, SEQ ID 1140, SEQ ID 1141, SEQ ID 1142, SEQ ID 1143, SEQ ID 1144, SEQ ID 1145, SEQ ID 1146, SEQ ID 1147, SEQ ID 1187, SEQ ID 1188, SEQ ID 1189, SEQ ID 1190, SEQ ID 1191, SEQ ID 1192, SEQ ID 1193, SEQ ID 1194, SEQ ID 1195, SEQ ID 1196, SEQ ID 1197, SEQ ID 1198, SEQ ID 1199, SEQ ID 1200, SEQ ID 1201, SEQ ID 1202, SEQ ID 1203, SEQ ID 1204, SEQ ID 1205, SEQ ID 1206, SEQ ID 1207, SEQ ID 1208, SEQ ID 1209, SEQ ID 1210, SEQ ID 1211, SEQ ID 1212, SEQ ID 1213, SEQ ID 1214, SEQ ID 1215, SEQ ID 1216, SEQ ID 1217, SEQ ID 1219, SEQ ID 1220, SEQ ID 1221, SEQ ID 1222, SEQ ID 1223, SEQ ID 1224, SEQ ID 1225, SEQ ID 1226, SEQ ID 1227, SEQ ID 1230, SEQ ID 1231, SEQ ID 1232, SEQ ID 1233, SEQ ID 1234, SEQ ID 1235, SEQ ID 1236, SEQ ID 1237, SEQ ID 1238, SEQ ID 1239, SEQ ID 1240, SEQ ID 1241, SEQ ID 1242, SEQ ID 1243, SEQ ID 1244, SEQ ID 1245, SEQ ID 1246, SEQ ID 1247, SEQ ID 1248, SEQ ID 1250, SEQ ID 1251, SEQ ID 1252, SEQ ID 1253, SEQ ID 1254, SEQ ID 1255, SEQ ID 1256, SEQ ID 1257, SEQ ID 1258, SEQ ID 1259, SEQ ID 1260, SEQ ID 1261, SEQ ID 1262, SEQ ID 1263, SEQ ID 1264, SEQ ID 1265, SEQ ID 1266, SEQ ID 1267, SEQ ID 1268, SEQ ID 1269, SEQ ID 1270, SEQ ID 1271, SEQ ID 1272, SEQ ID 1273, SEQ ID 1274, SEQ ID 1275, SEQ ID 1276, SEQ ID 1277, SEQ ID 1278, SEQ ID 1279, SEQ ID 1280, SEQ ID 1281, SEQ ID 1282, SEQ ID 1283, SEQ ID 1284, SEQ ID 1285, SEQ ID 1286, SEQ ID 1287, SEQ ID 1288, SEQ ID 1289, SEQ ID 1290, SEQ ID 1291, SEQ ID 1292, SEQ ID 1293, SEQ ID 1294, SEQ ID 1295, SEQ ID 1296, SEQ ID 1297, SEQ ID 1298, SEQ ID 1299, SEQ ID 1300, SEQ ID 1301, SEQ ID 1302, SEQ ID 1303, SEQ ID 1304, SEQ ID 1306, SEQ ID 1307, SEQ ID 1308, SEQ ID 1309, SEQ ID 1310, SEQ ID 1311, SEQ ID 1312, SEQ ID 1313, SEQ ID 1314, SEQ ID 1315, SEQ ID 1316, SEQ ID 1317, SEQ ID 1318, SEQ ID 1319, SEQ ID 1320, SEQ ID 1321, SEQ ID 1322, SEQ ID 1323, SEQ ID 1325, SEQ ID 1326, SEQ ID 1327, SEQ ID 1328, SEQ ID 1329, SEQ ID 1330, SEQ ID 1332, SEQ ID 1333, SEQ ID 1335, SEQ ID 1336, SEQ ID 1337, SEQ ID 1338, SEQ ID 1339, SEQ ID 1341, SEQ ID 1342, SEQ ID 1343, SEQ ID 1344, SEQ ID 1345, SEQ ID 1346, SEQ ID 1347, SEQ ID 1348, SEQ ID 1349, SEQ ID 1350, SEQ ID 1351, SEQ ID 1352, SEQ ID 1353, SEQ ID 1354, SEQ ID 1355, SEQ ID 1356, SEQ ID 1357, SEQ ID 1425, SEQ ID 1426, SEQ ID 1427, SEQ ID 1428, SEQ ID 1429, SEQ ID 1430, SEQ ID 1431, SEQ ID 1432, SEQ ID 1433, SEQ ID 1434, SEQ ID 1435, SEQ ID 1436, SEQ ID 1437, SEQ ID 1438, SEQ ID 1440, SEQ ID 1441, SEQ ID 1442, SEQ ID 1443, SEQ ID 1444, SEQ ID 1445, SEQ ID 1446, SEQ ID 1447, SEQ ID 1448, SEQ ID 1449, SEQ ID 1450, SEQ ID 1451, SEQ ID 1452, SEQ ID 1453, SEQ ID 1454, SEQ ID 1455, SEQ ID 1456, SEQ ID 1457, SEQ ID 1458, SEQ ID 1459, SEQ ID 1460, SEQ ID 1461, SEQ ID 1462, SEQ ID 1463, SEQ ID 1464, SEQ ID 1465, SEQ ID 1466, SEQ ID 1467, SEQ ID 1469, SEQ ID 1470, SEQ ID 1471, SEQ ID 1472, SEQ ID 1474, SEQ ID 1475, SEQ ID 1476, SEQ ID 1477, SEQ ID 1478, SEQ ID 1479, SEQ ID 1480, SEQ ID 1481, SEQ ID 1482, SEQ ID 1484, SEQ ID 1485, SEQ ID 1487, SEQ ID 1488, SEQ ID 1489, SEQ ID 1491, SEQ ID 1492, SEQ ID 1493, SEQ ID 1494, SEQ ID 1495, SEQ ID 1496, SEQ ID 1497, SEQ ID 1498, SEQ ID 1499, SEQ ID 1500, SEQ ID 1501, SEQ ID 1502, SEQ ID 1503, SEQ ID 1504, SEQ ID 1505, SEQ ID 1506, SEQ ID 1507, SEQ ID 1508, SEQ ID 1509, SEQ ID 1510, SEQ ID 1511, SEQ ID 1512, SEQ ID 1513, SEQ ID 1514, SEQ ID 1515, SEQ ID 1516, SEQ ID 1517, SEQ ID 1518, SEQ ID 1519, SEQ ID 1520, SEQ ID 1521, SEQ ID 1522, SEQ ID 1523, SEQ ID 1524, SEQ ID 1525, SEQ ID 1526, SEQ ID 1527, SEQ ID 1528, SEQ ID 1529, SEQ ID 1530, SEQ ID 1531, SEQ ID 1532, SEQ ID 1533, SEQ ID 1534, SEQ ID 1535, SEQ ID 1536, SEQ ID 1537, SEQ ID 1538, SEQ ID 1539, SEQ ID 1540, SEQ ID 1541, SEQ ID 1542, SEQ ID 1543, SEQ ID 1544, SEQ ID 1545, SEQ ID 1546, SEQ ID 1547, SEQ ID 1548, SEQ ID 1549, SEQ ID 1550, SEQ ID 1551, SEQ ID 1552, SEQ ID 1553, SEQ ID 1554, SEQ ID 1555, SEQ ID 1556, SEQ ID 1557, SEQ ID 1558, SEQ ID 1559, SEQ ID 1560, SEQ ID 1561, SEQ ID 1562, SEQ ID 1563, SEQ ID 1564, SEQ ID 1565, SEQ ID 1566, SEQ ID 1567, SEQ ID 1568, SEQ ID 1569, SEQ ID 1570, SEQ ID 1571, SEQ ID 1572, SEQ ID 1573, SEQ ID 1574, SEQ ID 1575, SEQ ID 1576, SEQ ID 1577, SEQ ID 1578, SEQ ID 1579, SEQ ID 1580, SEQ ID 1581, SEQ ID 1582, SEQ ID 1583, SEQ ID 1584, SEQ ID 1585, SEQ ID 1586, SEQ ID 1587, SEQ ID 1588, SEQ ID 1589, SEQ ID 1590, SEQ ID 1591, SEQ ID 1592, SEQ ID 1593, SEQ ID 1594, SEQ ID 1595, SEQ ID 1596, SEQ ID 1597, SEQ ID 1598, SEQ ID 1599, SEQ ID 1600, SEQ ID 1601, SEQ ID 1602, SEQ ID 1603, SEQ ID 1604, SEQ ID 1605, SEQ ID 1606, SEQ ID 1607, SEQ ID 1608, SEQ ID 1609, SEQ ID 1610, SEQ ID 1611, SEQ ID 1612, SEQ ID 1613, SEQ ID 1614, SEQ ID 1615, SEQ ID 1616, SEQ ID 1617, SEQ ID 1618, SEQ ID 1620, SEQ ID 1621, SEQ ID 1622, SEQ ID 1623, SEQ ID 1624, SEQ ID 1625, SEQ ID 1626, SEQ ID 1627, SEQ ID 1628, SEQ ID 1629, SEQ ID 1630, SEQ ID 1631, SEQ ID 1632, SEQ ID 1633, SEQ ID 1634, SEQ ID 1635, SEQ ID 1636, SEQ ID 1637, SEQ ID 1638, SEQ ID 1639, SEQ ID 1640, SEQ ID 1641, SEQ ID 1642, SEQ ID 1643, SEQ ID 1644, SEQ ID 1645, SEQ ID 1647, SEQ ID 1648, SEQ ID 1649, SEQ ID 1650, SEQ ID 1651, SEQ ID 1652, SEQ ID 1654, SEQ ID 1656, SEQ ID 1657, SEQ ID 1658, SEQ ID 1659, SEQ ID 1660, SEQ ID 1661, SEQ ID 1663, SEQ ID 1664, SEQ ID 1665, SEQ ID 1666, SEQ ID 1667, SEQ ID 1668, SEQ ID 1669, SEQ ID 1670, SEQ ID 1671, SEQ ID 1672, SEQ ID 1673, SEQ ID 1674, SEQ ID 1675, SEQ ID 1676, SEQ ID 1677, SEQ ID 1678, SEQ ID 1679, SEQ ID 1680, SEQ ID 1681, SEQ ID 1682, SEQ ID 1683, SEQ ID 1684, SEQ ID 1685, SEQ ID 1686, SEQ ID 1687, SEQ ID 1688, SEQ ID 1689, SEQ ID 1690, SEQ ID 1692, SEQ ID 1693, SEQ ID 1694, SEQ ID 1695, SEQ ID 1696, SEQ ID 1697, SEQ ID 1698, SEQ ID 1699, SEQ ID 1701, SEQ ID 1703, SEQ ID 1704, SEQ ID 1705, SEQ ID 1706, SEQ ID 1707, SEQ ID 1708, SEQ ID 1709, SEQ ID 1710, SEQ ID 1711, SEQ ID 1712, SEQ ID 1714, SEQ ID 1715, SEQ ID 1716, SEQ ID 1717, SEQ ID 1718, SEQ ID 1719, SEQ ID 1720, SEQ ID 1721, SEQ ID 1722, SEQ ID 1723, SEQ ID 1724, SEQ ID 1725, SEQ ID 1726, SEQ ID 1727, SEQ ID 1728, SEQ ID 1729, SEQ ID 1730, SEQ ID 1731, SEQ ID 1732, SEQ ID 1733, SEQ ID 1734, SEQ ID 1735, SEQ ID 1736, SEQ ID 1737, SEQ ID 1738, SEQ ID 1739, SEQ ID 1740, SEQ ID 1741, SEQ ID 1742, SEQ ID 1743, SEQ ID 1762, SEQ ID 1763, SEQ ID 1764, SEQ ID 1765, SEQ ID 1766, SEQ ID 1767, SEQ ID 1768, SEQ ID 1769, SEQ ID 1770, SEQ ID 1771, SEQ ID 1772, SEQ ID 1773, SEQ ID 1774, SEQ ID 1775, SEQ ID 1776, SEQ ID 1777, SEQ ID 1778, SEQ ID 1779, SEQ ID 1780, SEQ ID 1781, SEQ ID 1782, SEQ ID 1783, SEQ ID 1784, SEQ ID 1785, SEQ ID 1786, SEQ ID 1787, SEQ ID 1788, SEQ ID 1789, SEQ ID 1790, SEQ ID 1791, SEQ ID 1792, SEQ ID 1793, SEQ ID 1794, SEQ ID 1795, SEQ ID 1796, SEQ ID 1797, SEQ ID 1798, SEQ ID 1799, SEQ ID 1800, SEQ ID 1801, SEQ ID 1802, SEQ ID 1803, SEQ ID 1804, SEQ ID 1805, SEQ ID 1806, SEQ ID 1807, SEQ ID 1808, SEQ ID 1809, SEQ ID 1810, SEQ ID 1811, SEQ ID 1812, SEQ ID 1813, SEQ ID 1814, SEQ ID 1815, SEQ ID 1816, SEQ ID 1817, SEQ ID 1818, SEQ ID 1819, SEQ ID 1820, SEQ ID 1821, SEQ ID 1822, SEQ ID 1823, SEQ ID 1824, SEQ ID 1825, SEQ ID 1826, SEQ ID 1832, SEQ ID 1833, SEQ ID 1836, SEQ ID 1837, SEQ ID 1838, SEQ ID 1839, SEQ ID 1840, SEQ ID 1858, SEQ ID 1859, SEQ ID 1860, SEQ ID 1861, SEQ ID 1862, SEQ ID 1863, SEQ ID 1865, SEQ ID 1866, SEQ ID 1868, SEQ ID 1869, SEQ ID 1873, SEQ ID 1877, SEQ ID 1880, SEQ ID 1883, SEQ ID 1884, SEQ ID 1888, SEQ ID 1889, SEQ ID 1890, SEQ ID 1893, SEQ ID 1894, SEQ ID 1895, SEQ ID 1896, SEQ ID 1897, SEQ ID 1898, SEQ ID 1899, SEQ ID 1900, SEQ ID 1902, SEQ ID 1903, SEQ ID 1904, SEQ ID 1906, SEQ ID 1907, SEQ ID 1908, SEQ ID 1910, SEQ ID 1911, SEQ ID 1913, SEQ ID 1914, SEQ ID 1915, SEQ ID 1916, SEQ ID 1918, SEQ ID 1920, SEQ ID 1921, SEQ ID 1922, SEQ ID 1924, SEQ ID 1928, SEQ ID 1929, SEQ ID 1930, SEQ ID 1932, SEQ ID 1933, SEQ ID 1938, SEQ ID 1939, SEQ ID 1940, SEQ ID 1941, SEQ ID 1943, SEQ ID 1944, SEQ ID 1945, SEQ ID 1946, SEQ ID 1948, SEQ ID 1949, SEQ ID 1950, SEQ ID 1952, SEQ ID 1953, SEQ ID 1956, SEQ ID 1957, SEQ ID 1958, SEQ ID 1960, SEQ ID 1962, SEQ ID 1964, SEQ ID 1966, SEQ ID 1967, SEQ ID 1970, SEQ ID 1971, SEQ ID 1972, SEQ ID 1973, SEQ ID 1974, SEQ ID 1975, SEQ ID 1977, SEQ ID 1979, SEQ ID 1981, SEQ ID 1982, SEQ ID 1985, SEQ ID 1986, SEQ ID 1987, SEQ ID 1988, SEQ ID 1989, SEQ ID 1993, SEQ ID 1995, SEQ ID 1996, SEQ ID 1997, SEQ ID 1998, SEQ ID 1999, SEQ ID 2000, SEQ ID 2001, SEQ ID 2002, SEQ ID 2003, SEQ ID 2004, SEQ ID 2005, SEQ ID 2008, SEQ ID 2009, SEQ ID 2010, SEQ ID 2011, SEQ ID 2013, SEQ ID 2014, SEQ ID 2015, SEQ ID 2017, SEQ ID 2019, SEQ ID 2020, SEQ ID 2021, SEQ ID 2023, SEQ ID 2026, SEQ ID 2028, SEQ ID 2031, SEQ ID 2032, SEQ ID 2033, SEQ ID 2035, SEQ ID 2036, SEQ ID 2037, SEQ ID 2038, SEQ ID 2042, SEQ ID 2044, SEQ ID 2048, SEQ ID 2050, SEQ ID 2051, SEQ ID 2052, SEQ ID 2053, SEQ ID 2054, SEQ ID 2055, SEQ ID 2056, SEQ ID 2057, SEQ ID 2058, SEQ ID 2059, SEQ ID 2060, SEQ ID 2061, SEQ ID 2062, SEQ ID 2063, SEQ ID 2064, SEQ ID 2065, SEQ ID 2066, SEQ ID 2067, SEQ ID 2068, SEQ ID 2069, SEQ ID 2070, SEQ ID 2071, SEQ ID 2072, SEQ ID 2073, SEQ ID 2074, SEQ ID 2075, SEQ ID 2076, SEQ ID 2077, SEQ ID 2078, SEQ ID 2079, SEQ ID 2080, SEQ ID 2081, SEQ ID 2082, SEQ ID 2083, SEQ ID 2084, SEQ ID 2085, SEQ ID 2086, SEQ ID 2087, SEQ ID 2088, SEQ ID 2089, SEQ ID 2090, SEQ ID 2091, SEQ ID 2092, SEQ ID 2093, SEQ ID 2094, SEQ ID 2095, SEQ ID 2096, SEQ ID 2097, SEQ ID 2098, SEQ ID 2099, SEQ ID 2101, SEQ ID 2102, SEQ ID 2103, SEQ ID 2104, SEQ ID 2105, SEQ ID 2106, SEQ ID 2107, SEQ ID 2108, SEQ ID 2109, SEQ ID 2110, SEQ ID 2111, SEQ ID 2112, SEQ ID 2113, SEQ ID 2114, SEQ ID 2115, SEQ ID 2116, SEQ ID 2117, SEQ ID 2118, SEQ ID 2119, SEQ ID 2120, SEQ ID 2121, SEQ ID 2122, SEQ ID 2123, SEQ ID 2124, SEQ ID 2125, SEQ ID 2126, SEQ ID 2127, SEQ ID 2146, SEQ ID 2147, SEQ ID 2148, SEQ ID 2149, SEQ ID 2150, SEQ ID 2151, SEQ ID 2152, SEQ ID 2153, SEQ ID 2154, SEQ ID 2155, SEQ ID 2156, SEQ ID 2157, SEQ ID 2158, SEQ ID 2159, SEQ ID 2160, SEQ ID 2161, SEQ ID 2162, SEQ ID 2163, SEQ ID 2164, SEQ ID 2165, SEQ ID 2166, SEQ ID 2167, SEQ ID 2168, SEQ ID 2169, SEQ ID 2170, SEQ ID 2171, SEQ ID 2172, SEQ ID 2173, SEQ ID 2174, SEQ ID 2175, SEQ ID 2176, SEQ ID 2177, SEQ ID 2178, SEQ ID 2179, SEQ ID 2180, SEQ ID 2181, SEQ ID 2182, SEQ ID 2183, SEQ ID 2184, SEQ ID 2185, SEQ ID 2186, SEQ ID 2187, SEQ ID 2188, SEQ ID 2189, SEQ ID 2190, SEQ ID 2191, SEQ ID 2192, SEQ ID 2193, SEQ ID 2194, SEQ ID 2195, SEQ ID 2196, SEQ ID 2197, SEQ ID 2198, SEQ ID 2199, SEQ ID 2200, SEQ ID 2201, SEQ ID 2202, SEQ ID 2203, SEQ ID 2204, SEQ ID 2205, SEQ ID 2206, SEQ ID 2207, SEQ ID 2208, SEQ ID 2209, SEQ ID 2210, SEQ ID 2211, SEQ ID 2212, SEQ ID 2213, SEQ ID 2214, SEQ ID 2216, SEQ ID 2220, SEQ ID 2222, SEQ ID 2223, SEQ ID 2224, SEQ ID 2225, SEQ ID 2239, SEQ ID 2240, SEQ ID 2241, SEQ ID 2242, SEQ ID 2243, SEQ ID 2244, SEQ ID 2245, SEQ ID 2246, SEQ ID 2247, SEQ ID 2248, SEQ ID 2249, SEQ ID 2250, SEQ ID 2251, SEQ ID 2252, SEQ ID 2253, SEQ ID 2254, SEQ ID 2255, SEQ ID 2256, SEQ ID 2257, SEQ ID 2258, SEQ ID 2259, SEQ ID 2260, SEQ ID 2261, SEQ ID 2262, SEQ ID 2263, SEQ ID 2264, SEQ ID 2265, SEQ ID 2266, SEQ ID 2267, SEQ ID 2268, SEQ ID 2269, SEQ ID 2270, SEQ ID 2271, SEQ ID 2272, SEQ ID 2273, SEQ ID 2274, SEQ ID 2275, SEQ ID 2276, SEQ ID 2277, SEQ ID 2278, SEQ ID 2279, SEQ ID 2280, SEQ ID 2281, SEQ ID 2282, SEQ ID 2283, SEQ ID 2284, SEQ ID 2285, SEQ ID 2286, SEQ ID 2287, SEQ ID 2288, SEQ ID 2289, SEQ ID 2290, SEQ ID 2291, SEQ ID 2292, SEQ ID 2293, SEQ ID 2294, SEQ ID 2295, SEQ ID 2296, SEQ ID 2297, SEQ ID 2298, SEQ ID 2299, SEQ ID 2300, SEQ ID 2301, SEQ ID 2302, SEQ ID 2303, SEQ ID 2304, SEQ ID 2305, SEQ ID 2306, SEQ ID 2307, SEQ ID 2308, SEQ ID 2309, SEQ ID 2310, SEQ ID 2311, SEQ ID 2312, SEQ ID 2313, SEQ ID 2314, SEQ ID 2315, SEQ ID 2316, SEQ ID 2317, SEQ ID 2318, SEQ ID 2319, and SEQ ID 2320.

[0085] In some embodiments, the antisense oligonucleotide progranulin agonist is selected from the group consisting of SEQ ID 693, SEQ ID 707, SEQ ID 708, SEQ ID 709, SEQ ID 710, SEQ ID 711, SEQ ID 720, SEQ ID 721, SEQ ID 723, SEQ ID 724, SEQ ID 725, SEQ ID 726, SEQ ID 727, SEQ ID 730, SEQ ID 732, SEQ ID 736, SEQ ID 737, SEQ ID 738, SEQ ID 739, SEQ ID 741, SEQ ID 743, SEQ ID 745, SEQ ID 747, SEQ ID 758, SEQ ID 759, SEQ ID 760, SEQ ID 761, SEQ ID 766, SEQ ID 775, SEQ ID 798, SEQ ID 800, SEQ ID 801, SEQ ID 802, SEQ ID 803, SEQ ID 804, SEQ ID 807, SEQ ID 812, SEQ ID 813, SEQ ID 814, SEQ ID 816, SEQ ID 818, SEQ ID 819, SEQ ID 822, SEQ ID 823, SEQ ID 824, SEQ ID 825, SEQ ID 826, SEQ ID 827, SEQ ID 828, SEQ ID 830, SEQ ID 831, SEQ ID 833, SEQ ID 835, SEQ ID 836, SEQ ID 837, SEQ ID 838, SEQ ID 839, SEQ ID 840, SEQ ID 841, SEQ ID 842, SEQ ID 843, SEQ ID 844, SEQ ID 845, SEQ ID 846, SEQ ID 847, SEQ ID 848, SEQ ID 849, SEQ ID 850, SEQ ID 854, SEQ ID 855, SEQ ID 856, SEQ ID 857, SEQ ID 859, SEQ ID 861, SEQ ID 866, SEQ ID 867, SEQ ID 868, SEQ ID 869, SEQ ID 871, SEQ ID 873, SEQ ID 874, SEQ ID 876, SEQ ID 878, SEQ ID 879, SEQ ID 880, SEQ ID 881, SEQ ID 883, SEQ ID 885, SEQ ID 887, SEQ ID 888, SEQ ID 890, SEQ ID 891, SEQ ID 892, SEQ ID 893, SEQ ID 895, SEQ ID 897, SEQ ID 906, SEQ ID 909, SEQ ID 916, SEQ ID 918, SEQ ID 926, SEQ ID 927, SEQ ID 928, SEQ ID 932, SEQ ID 933, SEQ ID 934, SEQ ID 967, SEQ ID 998, SEQ ID 1000, SEQ ID 1001, SEQ ID 1002, SEQ ID 1003, SEQ ID 1005, SEQ ID 1010, SEQ ID 1011, SEQ ID 1012, SEQ ID 1021, SEQ ID 1023, SEQ ID 1024, SEQ ID 1027, SEQ ID 1030, SEQ ID 1037, SEQ ID 1038, SEQ ID 1039, SEQ ID 1041, SEQ ID 1042, SEQ ID 1048, SEQ ID 1049, SEQ ID 1050, SEQ ID 1051, SEQ ID 1054, SEQ ID 1058, SEQ ID 1060, SEQ ID 1061, SEQ ID 1063, SEQ ID 1066, SEQ ID 1070, SEQ ID 1071, SEQ ID 1072, SEQ ID 1073, SEQ ID 1075, SEQ ID 1078, SEQ ID 1081, SEQ ID 1083, SEQ ID 1084, SEQ ID 1085, SEQ ID 1086, SEQ ID 1091, SEQ ID 1092, SEQ ID 1093, SEQ ID 1109, SEQ ID 1111, SEQ ID 1112, SEQ ID 1113, SEQ ID 1114, SEQ ID 1115, SEQ ID 1116, SEQ ID 1117, SEQ ID 1118, SEQ ID 1119, SEQ ID 1120, SEQ ID 1121, SEQ ID 1122, SEQ ID 1123, SEQ ID 1124, SEQ ID 1125, SEQ ID 1126, SEQ ID 1127, SEQ ID 1128, SEQ ID 1129, SEQ ID 1130, SEQ ID 1132, SEQ ID 1135, SEQ ID 1136, SEQ ID 1137, SEQ ID 1138, SEQ ID 1139, SEQ ID 1140, SEQ ID 1141, SEQ ID 1142, SEQ ID 1143, SEQ ID 1144, SEQ ID 1146, SEQ ID 1188, SEQ ID 1189, SEQ ID 1190, SEQ ID 1191, SEQ ID 1192, SEQ ID 1196, SEQ ID 1200, SEQ ID 1201, SEQ ID 1202, SEQ ID 1203, SEQ ID 1204, SEQ ID 1205, SEQ ID 1206, SEQ ID 1207, SEQ ID 1208, SEQ ID 1209, SEQ ID 1223, SEQ ID 1224, SEQ ID 1238, SEQ ID 1243, SEQ ID 1244, SEQ ID 1258, SEQ ID 1259, SEQ ID 1262, SEQ ID 1263, SEQ ID 1264, SEQ ID 1267, SEQ ID 1268, SEQ ID 1271, SEQ ID 1276, SEQ ID 1282, SEQ ID 1283, SEQ ID 1284, SEQ ID 1285, SEQ ID 1286, SEQ ID 1288, SEQ ID 1290, SEQ ID 1291, SEQ ID 1292, SEQ ID 1294, SEQ ID 1297, SEQ ID 1298, SEQ ID 1304, SEQ ID 1311, SEQ ID 1313, SEQ ID 1314, SEQ ID 1315, SEQ ID 1344, SEQ ID 1345, SEQ ID 1346, SEQ ID 1347, SEQ ID 1348, SEQ ID 1349, SEQ ID 1352, SEQ ID 1355, SEQ ID 1357, SEQ ID 1425, SEQ ID 1426, SEQ ID 1427, SEQ ID 1428, SEQ ID 1430, SEQ ID 1431, SEQ ID 1432, SEQ ID 1433, SEQ ID 1434, SEQ ID 1435, SEQ ID 1436, SEQ ID 1437, SEQ ID 1438, SEQ ID 1440, SEQ ID 1441, SEQ ID 1442, SEQ ID 1443, SEQ ID 1444, SEQ ID 1445, SEQ ID 1446, SEQ ID 1447, SEQ ID 1448, SEQ ID 1449, SEQ ID 1450, SEQ ID 1451, SEQ ID 1454, SEQ ID 1455, SEQ ID 1456, SEQ ID 1457, SEQ ID 1460, SEQ ID 1461, SEQ ID 1462, SEQ ID 1463, SEQ ID 1464, SEQ ID 1467, SEQ ID 1469, SEQ ID 1474, SEQ ID 1478, SEQ ID 1480, SEQ ID 1482, SEQ ID 1488, SEQ ID 1492, SEQ ID 1493, SEQ ID 1497, SEQ ID 1498, SEQ ID 1505, SEQ ID 1506, SEQ ID 1507, SEQ ID 1509, SEQ ID 1510, SEQ ID 1512, SEQ ID 1513, SEQ ID 1514, SEQ ID 1515, SEQ ID 1517, SEQ ID 1520, SEQ ID 1524, SEQ ID 1525, SEQ ID 1528, SEQ ID 1529, SEQ ID 1530, SEQ ID 1531, SEQ ID 1532, SEQ ID 1533, SEQ ID 1534, SEQ ID 1535, SEQ ID 1536, SEQ ID 1537, SEQ ID 1538, SEQ ID 1539, SEQ ID 1540, SEQ ID 1541, SEQ ID 1542, SEQ ID 1544, SEQ ID 1545, SEQ ID 1546, SEQ ID 1547, SEQ ID 1548, SEQ ID 1549, SEQ ID 1550, SEQ ID 1551, SEQ ID 1552, SEQ ID 1553, SEQ ID 1554, SEQ ID 1555, SEQ ID 1556, SEQ ID 1558, SEQ ID 1560, SEQ ID 1563, SEQ ID 1565, SEQ ID 1568, SEQ ID 1569, SEQ ID 1575, SEQ ID 1577, SEQ ID 1578, SEQ ID 1579, SEQ ID 1582, SEQ ID 1583, SEQ ID 1584, SEQ ID 1585, SEQ ID 1586, SEQ ID 1587, SEQ ID 1588, SEQ ID 1589, SEQ ID 1590, SEQ ID 1591, SEQ ID 1593, SEQ ID 1594, SEQ ID 1595, SEQ ID 1596, SEQ ID 1599, SEQ ID 1608, SEQ ID 1609, SEQ ID 1610, SEQ ID 1611, SEQ ID 1612, SEQ ID 1613, SEQ ID 1614, SEQ ID 1615, SEQ ID 1616, SEQ ID 1617, SEQ ID 1618, SEQ ID 1620, SEQ ID 1621, SEQ ID 1622, SEQ ID 1623, SEQ ID 1624, SEQ ID 1626, SEQ ID 1630, SEQ ID 1631, SEQ ID 1633, SEQ ID 1635, SEQ ID 1637, SEQ ID 1638, SEQ ID 1639, SEQ ID 1643, SEQ ID 1644, SEQ ID 1645, SEQ ID 1648, SEQ ID 1649, SEQ ID 1651, SEQ ID 1658, SEQ ID 1667, SEQ ID 1669, SEQ ID 1677, SEQ ID 1679, SEQ ID 1681, SEQ ID 1684, SEQ ID 1685, SEQ ID 1686, SEQ ID 1688, SEQ ID 1689, SEQ ID 1690, SEQ ID 1692, SEQ ID 1704, SEQ ID 1707, SEQ ID 1708, SEQ ID 1709, SEQ ID 1710, SEQ ID 1711, SEQ ID 1712, SEQ ID 1714, SEQ ID 1715, SEQ ID 1717, SEQ ID 1718, SEQ ID 1719, SEQ ID 1720, SEQ ID 1721, SEQ ID 1722, SEQ ID 1723, SEQ ID 1724, SEQ ID 1725, SEQ ID 1726, SEQ ID 1727, SEQ ID 1728, SEQ ID 1731, SEQ ID 1732, SEQ ID 1733, SEQ ID 1734, SEQ ID 1735, SEQ ID 1736, SEQ ID 1737, SEQ ID 1738, SEQ ID 1741, SEQ ID 1742, SEQ ID 1762, SEQ ID 1764, SEQ ID 1765, SEQ ID 1766, SEQ ID 1767, SEQ ID 1768, SEQ ID 1769, SEQ ID 1770, SEQ ID 1771, SEQ ID 1773, SEQ ID 1775, SEQ ID 1776, SEQ ID 1779, SEQ ID 1780, SEQ ID 1781, SEQ ID 1782, SEQ ID 1783, SEQ ID 1784, SEQ ID 1785, SEQ ID 1786, SEQ ID 1787, SEQ ID 1789, SEQ ID 1791, SEQ ID 1792, SEQ ID 1794, SEQ ID 1795, SEQ ID 1796, SEQ ID 1800, SEQ ID 1801, SEQ ID 1802, SEQ ID 1804, SEQ ID 1805, SEQ ID 1806, SEQ ID 1807, SEQ ID 1808, SEQ ID 1809, SEQ ID 1811, SEQ ID 1812, SEQ ID 1813, SEQ ID 1814, SEQ ID 1815, SEQ ID 1816, SEQ ID 1817, SEQ ID 1818, SEQ ID 1819, SEQ ID 1820, SEQ ID 1821, SEQ ID 1822, SEQ ID 1823, SEQ ID 1824, SEQ ID 1832, SEQ ID 1833, SEQ ID 1838, SEQ ID 1839, SEQ ID 1840, SEQ ID 1862, SEQ ID 1866, SEQ ID 1868, SEQ ID 1873, SEQ ID 1877, SEQ ID 1883, SEQ ID 1884, SEQ ID 1888, SEQ ID 1889, SEQ ID 1893, SEQ ID 1894, SEQ ID 1928, SEQ ID 1929, SEQ ID 1933, SEQ ID 1938, SEQ ID 1939, SEQ ID 1940, SEQ ID 1941, SEQ ID 1943, SEQ ID 1944, SEQ ID 1948, SEQ ID 1950, SEQ ID 1952, SEQ ID 1956, SEQ ID 1966, SEQ ID 1985, SEQ ID 1986, SEQ ID 1996, SEQ ID 1997, SEQ ID 1998, SEQ ID 1999, SEQ ID 2000, SEQ ID 2005, SEQ ID 2013, SEQ ID 2015, SEQ ID 2020, SEQ ID 2023, SEQ ID 2026, SEQ ID 2028, SEQ ID 2031, SEQ ID 2032, SEQ ID 2033, SEQ ID 2042, SEQ ID 2048, SEQ ID 2052, SEQ ID 2053, SEQ ID 2055, SEQ ID 2056, SEQ ID 2057, SEQ ID 2058, SEQ ID 2059, SEQ ID 2060, SEQ ID 2061, SEQ ID 2063, SEQ ID 2065, SEQ ID 2066, SEQ ID 2067, SEQ ID 2068, SEQ ID 2070, SEQ ID 2072, SEQ ID 2073, SEQ ID 2075, SEQ ID 2076, SEQ ID 2079, SEQ ID 2080, SEQ ID 2081, SEQ ID 2082, SEQ ID 2083, SEQ ID 2084, SEQ ID 2085, SEQ ID 2086, SEQ ID 2087, SEQ ID 2088, SEQ ID 2089, SEQ ID 2090, SEQ ID 2091, SEQ ID 2092, SEQ ID 2093, SEQ ID 2094, SEQ ID 2095, SEQ ID 2097, SEQ ID 2116, SEQ ID 2119, SEQ ID 2120, SEQ ID 2121, SEQ ID 2122, SEQ ID 2123, SEQ ID 2124, SEQ ID 2125, SEQ ID 2126, SEQ ID 2127, SEQ ID 2146, SEQ ID 2147, SEQ ID 2148, SEQ ID 2158, SEQ ID 2160, SEQ ID 2162, SEQ ID 2163, SEQ ID 2165, SEQ ID 2166, SEQ ID 2167, SEQ ID 2168, SEQ ID 2169, SEQ ID 2170, SEQ ID 2171, SEQ ID 2172, SEQ ID 2173, SEQ ID 2174, SEQ ID 2175, SEQ ID 2176, SEQ ID 2177, SEQ ID 2181, SEQ ID 2182, SEQ ID 2183, SEQ ID 2184, SEQ ID 2185, SEQ ID 2186, SEQ ID 2187, SEQ ID 2193, SEQ ID 2194, SEQ ID 2195, SEQ ID 2196, SEQ ID 2197, SEQ ID 2198, SEQ ID 2199, SEQ ID 2200, SEQ ID 2202, SEQ ID 2203, SEQ ID 2204, SEQ ID 2206, SEQ ID 2208, SEQ ID 2209, SEQ ID 2210, SEQ ID 2211, SEQ ID 2212, SEQ ID 2213, SEQ ID 2214, SEQ ID 2216, SEQ ID 2222, SEQ ID 2224, SEQ ID 2239, SEQ ID 2240, SEQ ID 2242, SEQ ID 2243, SEQ ID 2244, SEQ ID 2245, SEQ ID 2246, SEQ ID 2247, SEQ ID 2248, SEQ ID 2251, SEQ ID 2252, SEQ ID 2253, SEQ ID 2254, SEQ ID 2255, SEQ ID 2256, SEQ ID 2257, SEQ ID 2258, SEQ ID 2259, SEQ ID 2260, SEQ ID 2261, SEQ ID 2262, SEQ ID 2263, SEQ ID 2264, SEQ ID 2265, SEQ ID 2266, SEQ ID 2267, SEQ ID 2268, SEQ ID 2269, SEQ ID 2280, SEQ ID 2281, SEQ ID 2282, SEQ ID 2283, SEQ ID 2284, SEQ ID 2285, SEQ ID 2294, SEQ ID 2295, SEQ ID 2302, SEQ ID 2307, SEQ ID 2308, SEQ ID 2309, SEQ ID 2310, SEQ ID 2311, SEQ ID 2312, SEQ ID 2316, SEQ ID 2317, SEQ ID 2318, SEQ ID 2319, and SEQ ID 2320.

[0086] The invention provides for a conjugate comprising the antisense oligonucleotide progranulin agonist according to the invention, and at least one conjugate moiety covalently attached to said antisense oligonucleotide progranulin agonist.

[0087] The invention provides an antisense oligonucleotide progranulin agonist covalently attached to at least one conjugate moiety.

[0088] The invention provides for a pharmaceutically acceptable salt of the antisense oligonucleotide progranulin agonist according to the invention, or the conjugate according to the invention.

[0089] The invention provides for an antisense oligonucleotide progranulin agonist according to the invention wherein the antisense oligonucleotide progranulin agonist is in the form of a pharmaceutically acceptable salt. In some embodiments the pharmaceutically acceptable salt may be a sodium salt or a potassium salt.

[0090] The invention provides for a pharmaceutically acceptable sodium salt of the antisense oligonucleotide progranulin agonist according to the invention, or the conjugate according to the invention.

[0091] The invention provides for a pharmaceutically acceptable potassium salt of the antisense oligonucleotide progranulin agonist according to the invention, or the conjugate according to the invention.

[0092] The invention provides for a pharmaceutical composition comprising the antisense oligonucleotide progranulin agonist of the invention, or the conjugate of the invention, and a pharmaceutically acceptable diluent, solvent, carrier, salt and/or adjuvant.

[0093] The invention provides for a pharmaceutical composition comprising the antisense oligonucleotide progranulin agonist of the invention, or the conjugate of the invention, and a pharmaceutically acceptable salt. For example, the salt may comprise a metal cation, such as a sodium salt or a potassium salt.

[0094] The invention provides for a pharmaceutical composition according to the invention, wherein the pharmaceutical composition comprises the antisense oligonucleotide progranulin agonist of the invention or the conjugate of the invention, or the pharmaceutically acceptable salt of the invention; and an aqueous diluent or solvent.

[0095] The invention provides for a solution, such as a phosphate buffered saline solution of the antisense oligonucleotide progranulin agonist of the invention, or the conjugate of the invention, or the pharmaceutically acceptable salt of the invention. Suitably the solution, such as phosphate buffered saline solution, of the invention, is a sterile solution.

[0096] The invention provides for a method for enhancing the expression of progranulin in a cell which is expressing progranulin, said method comprising administering an antisense oligonucleotide progranulin agonist of the invention or the conjugate of the invention, or the salt according to the invention, or the pharmaceutical composition according to the invention in an effective amount to said cell. In some embodiments the method is an in vitro method. In some embodiments the method is an in vivo method.

[0097] In some embodiments, the cell is either a human cell or a mammalian cell.

[0098] The invention provides for a method for treating or preventing neurological disease, comprising administering a therapeutically or prophylactically effective amount of an antisense oligonucleotide progranulin agonist of the invention or the conjugate of the invention, or the salt of the invention, or the pharmaceutical composition of the invention to a subject suffering from or susceptible to neurological disease. In one embodiment the neurological disease may be a TDP-43 pathology.

[0099] The invention provides for a method for treating progranulin haploinsufficiency disease, comprising administering a therapeutically or prophylactically effective amount of an antisense oligonucleotide progranulin agonist of the invention or the conjugate of the invention, or the salt of the invention, or the pharmaceutical composition of the invention to a subject suffering from progranulin haploinsufficiency or a related disorder.

[0100] The invention provides for an antisense oligonucleotide progranulin agonist, for use as a medicament.

[0101] The invention provides for an antisense oligonucleotide progranulin agonist, for use in therapy.

[0102] The invention provides for the antisense oligonucleotide progranulin agonist of the invention or the conjugate of the invention, or the salt of the invention, or the pharmaceutical composition of the invention, for use as a medicament.

[0103] The invention provides an antisense oligonucleotide progranulin agonist of the invention or the conjugate of the invention, or the salt according to the invention, or the pharmaceutical composition according to the invention for use in therapy.

[0104] The invention provides for an antisense oligonucleotide progranulin agonist of the invention or the conjugate according to the invention, or the salt according to the invention, or the pharmaceutical composition according to the invention for use in the treatment of a neurological disease. In one embodiment the neurological disease may be a TDP-43 pathology.

[0105] The invention provides for an antisense oligonucleotide progranulin agonist of the invention or the conjugate according to the invention, or the salt according to the invention, or the pharmaceutical composition according to the invention for use in the treatment of progranulin haploinsufficiency, or a related disorder.

[0106] The invention provides for the use of an antisense oligonucleotide progranulin agonist of the invention or the conjugate according to the invention, or the salt according to the invention, or the pharmaceutical composition according to the invention, for the preparation of a medicament for treatment or prevention of a neurological disease In one embodiment the neurological disease may be a TDP-43 pathology.

[0107] The invention provides for the use of the antisense oligonucleotide progranulin agonist of the invention or the conjugate according to the invention, or the salt according to the invention, or the pharmaceutical composition according to the invention, for the preparation of a medicament for treatment of progranulin haploinsufficiency or a related disorder.

[0108] In some embodiments the method or use of the invention is for the treatment of fronto temporal dementia (FTD), neuropathologic frontotemporal lobar degeneration or neuroinflammation. In other embodiments the method or use of the invention is for the treatment of amyotrophic lateral sclerosis (ALS), Alzheimer's disease, Parkinson's disease, Autism, Hippocampal sclerosis dementia, Down syndrome, Huntington's disease, polyglutamine diseases, spinocerebellar ataxia 3, myopathies or Chronic Traumatic Encephalopathy.

[0109] In one aspect the invention includes an oligonucleotide progranulin agonist having the structure:

[chemical structure]

[0110] The invention also includes an antisense oligonucleotide progranulin agonist wherein the oligonucleotide is the oligonucleotide compound TgGccAggGatCagGG (SEQ ID NO: 106) wherein capital letters represent beta-D-oxy LNA nucleosides, lowercase letters represent DNA nucleosides, all LNA C are 5-methyl cytosine, and all internucleoside linkages are phosphorothioate internucleoside linkages.

### BRIEF DESCRIPTION OF FIGURES

[0111] FIG. 1 shows progranulin expression levels in H4 neuroglioma cells following 5 days of treatment with 16-mer oligos targeting the progranulin 5′ UTR uORF region. Progranulin expression levels were evaluated in media after dilution 1:8 by ELISA from Abcam (ab252364).

[0112] FIG. 2 (SEQ ID NOS: 689, 3949, 3950 and 3951, respectively) shows localization of compounds #105, #106, #110 and #114 to the 5′ UTR of the progranulin mature mRNA transcript, targeting the uORF region.

[0113] FIGS. 3 and 4 show progranulin expression levels in H4 neuroglioma cells following 5 days of treatment with 16-mer oligos targeting 5′ UTR uORF region. Progranulin expression levels were evaluated in cell lysate (RIPA lysis and extraction buffer from Pierce cat. No. 89900) using the WES platform (ProteinSimple) and GRN antibody Invitrogen PA5-27275 diluted 1:25 and HPRT1 antibody ab109021 (Abcam) diluted 1:50.

[0114] FIG. 5 shows the level of progranulin expression in hiPSC derived microglia following 5 days of treatment with Compound #106. Progranulin expression levels were evaluated in media after dilution 1:8 by ELISA from Abcam (ab252364).

[0115] FIG. 6 shows progranulin expression levels in H4 neuroglioma cells following 5 days of treatment with 18-mer oligos targeting the progranulin 5′ UTR uORF region. Progranulin expression levels were evaluated in media after dilution 1:8 by ELISA from Abcam (ab252364).

[0116] FIG. 7 shows the structure of Compound ID #106 (SEQ ID NO 106).

[0117] FIG. 8 shows progranulin expression in H4 neuroglioma cells following treatment with Compound #106, Compound #106 full 2′MOE, and Compound #106 full 2′oMe.

[0118] FIG. 9 shows heat maps indicating genes upregulated and down regulated relative to PBS control treated cells. Left is compound #106, middle is Compound #106 full 2′oMe and right is Compound #106 full 2′MOE.

[0119] FIG. 10 is a plot showing the position of oligos within the progranulin precursor-mRNA (pre-mRNA) sequence (SEQ ID NO 3949) relative to the activity of the oligo. Oligos complementary to exon-exon junctions are plotted downstream of the schematic figure of the pre-mRNA

### DEFINITIONS

### Progranulin Agonist

[0120] The term “progranulin agonist” as used herein refers to a compound which is capable of enhancing the expression of progranulin transcripts and/or protein in a cell which is expressing progranulin.

### TDP-43 Pathologies

[0121] A TDP-43 pathology is a disease which is associated with reduced or aberrant expression of TDP-43, often associated with an increase in cytoplasmic TDP-43, particularly hyper-phosphorylated and ubiquitinated TDP-43.

[0122] Diseases associated with TDP-43 pathology include amyotrophic lateral sclerosis (ALS), frontotemporal lobar degeneration (FTLD), Alzheimer's disease, Parkinson's disease, Autism, Hippocampal sclerosis dementia, Down syndrome, Huntington's disease, polyglutamine diseases, such as spinocerebellar ataxia 3, myopathies and Chronic Traumatic Encephalopathy.

### Oligonucleotide

[0123] The term “oligonucleotide” as used herein is defined as it is generally understood by the skilled person as a molecule comprising two or more covalently linked nucleosides. Such covalently bound nucleosides may also be referred to as nucleic acid molecules or oligomers.

[0124] Oligonucleotides are commonly made in the laboratory by solid-phase chemical synthesis followed by purification and isolation. When referring to a sequence of the oligonucleotide, reference is made to the sequence or order of nucleobase moieties, or modifications thereof, of the covalently linked nucleotides or nucleosides. The oligonucleotides of the invention are man-made, and are chemically synthesized, and are typically purified or isolated. The oligonucleotides of the invention may comprise one or more modified nucleosides such as 2′ sugar modified nucleosides. The oligonucleotides of the invention may comprise one or more modified internucleoside linkages, such as one or more phosphorothioate internucleoside linkages.

### Antisense Oligonucleotides

[0125] The term “antisense oligonucleotide” as used herein is defined as an oligonucleotide capable of modulating expression of a target gene by hybridizing to a target nucleic acid, in particular to a contiguous sequence on a target nucleic acid. Antisense oligonucleotides are not essentially double stranded and are therefore not siRNAs or shRNAs. The antisense oligonucleotides of the present invention may be single stranded. It is understood that single stranded oligonucleotides of the present invention can form hairpins or intermolecular duplex structures (duplex between two molecules of the same oligonucleotide), as long as the degree of intra or inter self-complementarity is less than approximately 50% across of the full length of the oligonucleotide.

[0126] In some embodiments, the single stranded antisense oligonucleotides of the invention may not contain RNA nucleosides.

[0127] Advantageously, the antisense oligonucleotides of the invention comprise one or more modified nucleosides or nucleotides, such as 2′ sugar modified nucleosides. Furthermore, in some antisense oligonucleotides of the invention, it may be advantageous that the nucleosides which are not modified are DNA nucleosides.

### Contiguous Nucleotide Sequence

[0128] The term “contiguous nucleotide sequence” refers to the region of the oligonucleotide which is complementary to a target nucleic acid, which may be or may comprise an oligonucleotide motif sequence. The term is used interchangeably herein with the term “contiguous nucleobase sequence”. In some embodiments all the nucleosides of the oligonucleotide constitute the contiguous nucleotide sequence. The contiguous nucleotide sequence is the sequence of nucleotides in the oligonucleotide of the invention which are complementary to, and in some instances fully complementary to, the target nucleic acid or target sequence, or target site sequence.

[0129] In some embodiments the target sequence is SEQ ID NO 2.

SEQ ID NO 2:
TAGCCCTGATCCCTGGCCAATGGAAACTGAGGTAGG

[0130] In some embodiments the target sequence is selected from the group consisting of SEQ ID NO 343-682.

[0131] In some embodiments the target sequence is nucleotides 38-246 of SEQ ID NO 1.

[0132] In some embodiments the target sequence is selected from the group consisting of SEQ ID NO 568, SEQ ID NO 571, SEQ ID NO 575, SEQ ID NO 576, SEQ ID NO 577, SEQ ID NO 578, SEQ ID NO 584 & SEQ ID NO 586.

[0133] In some embodiments the target sequence is SEQ ID NO 683.

SEQ ID NO 683 = TGGCCAATGGAAACTGAGGTAGG

[0134] In some embodiments the target sequence is SEQ ID NO 684.

SEQ ID NO 684 = CCCTAGCACCTCCCCCTAACCAAATTCTCCCTG

[0135] In some embodiments the target sequence is SEQ ID NO 685.

SEQ ID NO 685 = CCCATTCTGAGCTCCCCATCA

[0136] In some embodiments the target sequence is SEQ ID NO 686.

SEQ ID NO 686 = AGGGGGTTGTGGCAAAAGCCA

[0137] In some embodiments the target sequence is SEQ ID NO 687.

SEQ ID NO 687 = CCATCCCCTCCCCGTTTCAGT

[0138] In some embodiments the target sequence is SEQ ID NO 688.

SEQ ID NO 688 = ATCCACAGGGGTGTTTGT

[0139] In some embodiments the target sequence is SEQ ID NO 689.

SEQ ID NO 689 = TAAGTAGCCAATGGGAGCGGGTAGCCCTGATCCC
TGGCCAATGGAAACTGAGGTAGG

[0140] SEQ ID NO 689 is in the human progranulin mature mRNA 5′ UTR from position 119 to 158 according to RefSeq NM_002087 (SEQ ID NO 1), as targeted by SEQ ID NOs 207 to 246 and identified herein as an advantageous region to target for progranulin agonist activity.

[0141] In some embodiments the target sequence is nucleotides 2039-2346 of SEQ ID NO 1.

[0142] In some embodiments the target sequence is selected from the group consisting of SEQ ID NO 684, SEQ ID NO 685, SEQ ID NO 683, SEQ ID NO 686, SEQ ID NO 687, and SEQ ID NO 688.

[0143] In some embodiments the target sequence is selected from the group consisting of SEQ ID NO 607, SEQ ID NO 608, SEQ ID NO 609, SEQ ID NO 610, SEQ ID NO 611, SEQ ID NO 612, SEQ ID NO 619, SEQ ID NO 620, SEQ ID NO 633, SEQ ID NO 640, SEQ ID NO 641, SEQ ID NO 645, SEQ ID NO 651, and SEQ ID NO 652.

[0144] In some embodiments the target sequence is selected from the group consisting of SEQ ID NO 2040-3386.

[0145] In some embodiments the target sequence is selected from the group consisting of SEQ ID 2321, SEQ ID 2322, SEQ ID 2324, SEQ ID 2328, SEQ ID 2329, SEQ ID 2331, SEQ ID 2334, SEQ ID 2335, SEQ ID 2336, SEQ ID 2337, SEQ ID 2338, SEQ ID 2339, SEQ ID 2340, SEQ ID 2341, SEQ ID 2342, SEQ ID 2345, SEQ ID 2346, SEQ ID 2347, SEQ ID 2348, SEQ ID 2349, SEQ ID 2350, SEQ ID 2351, SEQ ID 2352, SEQ ID 2353, SEQ ID 2354, SEQ ID 2355, SEQ ID 2356, SEQ ID 2357, SEQ ID 2358, SEQ ID 2359, SEQ ID 2360, SEQ ID 2361, SEQ ID 2362, SEQ ID 2364, SEQ ID 2365, SEQ ID 2366, SEQ ID 2367, SEQ ID 2368, SEQ ID 2369, SEQ ID 2370, SEQ ID 2371, SEQ ID 2372, SEQ ID 2373, SEQ ID 2374, SEQ ID 2375, SEQ ID 2376, SEQ ID 2377, SEQ ID 2378, SEQ ID 2379, SEQ ID 2380, SEQ ID 2381, SEQ ID 2384, SEQ ID 2386, SEQ ID 2387, SEQ ID 2388, SEQ ID 2389, SEQ ID 2390, SEQ ID 2392, SEQ ID 2393, SEQ ID 2394, SEQ ID 2395, SEQ ID 2396, SEQ ID 2397, SEQ ID 2398, SEQ ID 2399, SEQ ID 2400, SEQ ID 2401, SEQ ID 2403, SEQ ID 2404, SEQ ID 2405, SEQ ID 2406, SEQ ID 2407, SEQ ID 2408, SEQ ID 2410, SEQ ID 2411, SEQ ID 2413, SEQ ID 2414, SEQ ID 2415, SEQ ID 2416, SEQ ID 2418, SEQ ID 2419, SEQ ID 2421, SEQ ID 2424, SEQ ID 2425, SEQ ID 2426, SEQ ID 2427, SEQ ID 2428, SEQ ID 2429, SEQ ID 2430, SEQ ID 2431, SEQ ID 2432, SEQ ID 2433, SEQ ID 2434, SEQ ID 2435, SEQ ID 2436, SEQ ID 2437, SEQ ID 2438, SEQ ID 2439, SEQ ID 2440, SEQ ID 2441, SEQ ID 2442, SEQ ID 2443, SEQ ID 2444, SEQ ID 2445, SEQ ID 2446, SEQ ID 2447, SEQ ID 2448, SEQ ID 2449, SEQ ID 2450, SEQ ID 2451, SEQ ID 2452, SEQ ID 2453, SEQ ID 2454, SEQ ID 2455, SEQ ID 2456, SEQ ID 2457, SEQ ID 2458, SEQ ID 2459, SEQ ID 2460, SEQ ID 2461, SEQ ID 2462, SEQ ID 2463, SEQ ID 2464, SEQ ID 2465, SEQ ID 2466, SEQ ID 2467, SEQ ID 2468, SEQ ID 2469, SEQ ID 2470, SEQ ID 2471, SEQ ID 2472, SEQ ID 2473, SEQ ID 2474, SEQ ID 2475, SEQ ID 2476, SEQ ID 2477, SEQ ID 2478, SEQ ID 2479, SEQ ID 2481, SEQ ID 2482, SEQ ID 2483, SEQ ID 2484, SEQ ID 2485, SEQ ID 2487, SEQ ID 2489, SEQ ID 2490, SEQ ID 2491, SEQ ID 2492, SEQ ID 2493, SEQ ID 2494, SEQ ID 2495, SEQ ID 2496, SEQ ID 2497, SEQ ID 2498, SEQ ID 2499, SEQ ID 2501, SEQ ID 2502, SEQ ID 2503, SEQ ID 2504, SEQ ID 2505, SEQ ID 2506, SEQ ID 2507, SEQ ID 2508, SEQ ID 2509, SEQ ID 2510, SEQ ID 2511, SEQ ID 2512, SEQ ID 2513, SEQ ID 2514, SEQ ID 2515, SEQ ID 2516, SEQ ID 2518, SEQ ID 2519, SEQ ID 2520, SEQ ID 2521, SEQ ID 2522, SEQ ID 2523, SEQ ID 2524, SEQ ID 2525, SEQ ID 2526, SEQ ID 2527, SEQ ID 2528, SEQ ID 2531, SEQ ID 2533, SEQ ID 2534, SEQ ID 2535, SEQ ID 2536, SEQ ID 2537, SEQ ID 2538, SEQ ID 2540, SEQ ID 2541, SEQ ID 2542, SEQ ID 2544, SEQ ID 2546, SEQ ID 2547, SEQ ID 2549, SEQ ID 2550, SEQ ID 2551, SEQ ID 2553, SEQ ID 2554, SEQ ID 2555, SEQ ID 2556, SEQ ID 2557, SEQ ID 2560, SEQ ID 2561, SEQ ID 2562, SEQ ID 2563, SEQ ID 2565, SEQ ID 2566, SEQ ID 2567, SEQ ID 2572, SEQ ID 2573, SEQ ID 2574, SEQ ID 2575, SEQ ID 2576, SEQ ID 2577, SEQ ID 2578, SEQ ID 2579, SEQ ID 2580, SEQ ID 2581, SEQ ID 2582, SEQ ID 2583, SEQ ID 2584, SEQ ID 2585, SEQ ID 2586, SEQ ID 2588, SEQ ID 2589, SEQ ID 2590, SEQ ID 2591, SEQ ID 2592, SEQ ID 2593, SEQ ID 2594, SEQ ID 2595, SEQ ID 2596, SEQ ID 2597, SEQ ID 2598, SEQ ID 2599, SEQ ID 2601, SEQ ID 2602, SEQ ID 2603, SEQ ID 2604, SEQ ID 2606, SEQ ID 2610, SEQ ID 2613, SEQ ID 2614, SEQ ID 2615, SEQ ID 2619, SEQ ID 2622, SEQ ID 2623, SEQ ID 2624, SEQ ID 2625, SEQ ID 2626, SEQ ID 2627, SEQ ID 2628, SEQ ID 2629, SEQ ID 2630, SEQ ID 2631, SEQ ID 2632, SEQ ID 2633, SEQ ID 2634, SEQ ID 2635, SEQ ID 2636, SEQ ID 2637, SEQ ID 2638, SEQ ID 2639, SEQ ID 2640, SEQ ID 2641, SEQ ID 2642, SEQ ID 2643, SEQ ID 2644, SEQ ID 2645, SEQ ID 2646, SEQ ID 2647, SEQ ID 2648, SEQ ID 2649, SEQ ID 2650, SEQ ID 2651, SEQ ID 2652, SEQ ID 2653, SEQ ID 2654, SEQ ID 2655, SEQ ID 2656, SEQ ID 2658, SEQ ID 2659, SEQ ID 2660, SEQ ID 2661, SEQ ID 2662, SEQ ID 2663, SEQ ID 2664, SEQ ID 2665, SEQ ID 2666, SEQ ID 2667, SEQ ID 2668, SEQ ID 2669, SEQ ID 2670, SEQ ID 2671, SEQ ID 2672, SEQ ID 2673, SEQ ID 2674, SEQ ID 2675, SEQ ID 2676, SEQ ID 2677, SEQ ID 2678, SEQ ID 2679, SEQ ID 2680, SEQ ID 2681, SEQ ID 2682, SEQ ID 2683, SEQ ID 2684, SEQ ID 2685, SEQ ID 2686, SEQ ID 2687, SEQ ID 2688, SEQ ID 2689, SEQ ID 2690, SEQ ID 2691, SEQ ID 2693, SEQ ID 2694, SEQ ID 2695, SEQ ID 2696, SEQ ID 2697, SEQ ID 2698, SEQ ID 2699, SEQ ID 2700, SEQ ID 2701, SEQ ID 2702, SEQ ID 2703, SEQ ID 2704, SEQ ID 2705, SEQ ID 2706, SEQ ID 2707, SEQ ID 2708, SEQ ID 2709, SEQ ID 2710, SEQ ID 2711, SEQ ID 2712, SEQ ID 2713, SEQ ID 2714, SEQ ID 2715, SEQ ID 2716, SEQ ID 2717, SEQ ID 2718, SEQ ID 2719, SEQ ID 2720, SEQ ID 2721, SEQ ID 2722, SEQ ID 2723, SEQ ID 2726, SEQ ID 2727, SEQ ID 2728, SEQ ID 2729, SEQ ID 2730, SEQ ID 2733, SEQ ID 2734, SEQ ID 2735, SEQ ID 2736, SEQ ID 2737, SEQ ID 2738, SEQ ID 2739, SEQ ID 2740, SEQ ID 2741, SEQ ID 2742, SEQ ID 2743, SEQ ID 2744, SEQ ID 2745, SEQ ID 2746, SEQ ID 2747, SEQ ID 2748, SEQ ID 2749, SEQ ID 2750, SEQ ID 2751, SEQ ID 2752, SEQ ID 2753, SEQ ID 2754, SEQ ID 2755, SEQ ID 2756, SEQ ID 2757, SEQ ID 2758, SEQ ID 2759, SEQ ID 2760, SEQ ID 2761, SEQ ID 2762, SEQ ID 2763, SEQ ID 2764, SEQ ID 2765, SEQ ID 2766, SEQ ID 2767, SEQ ID 2768, SEQ ID 2769, SEQ ID 2770, SEQ ID 2771, SEQ ID 2772, SEQ ID 2773, SEQ ID 2774, SEQ ID 2775, SEQ ID 2815, SEQ ID 2816, SEQ ID 2817, SEQ ID 2818, SEQ ID 2819, SEQ ID 2820, SEQ ID 2821, SEQ ID 2822, SEQ ID 2823, SEQ ID 2824, SEQ ID 2825, SEQ ID 2826, SEQ ID 2827, SEQ ID 2828, SEQ ID 2829, SEQ ID 2830, SEQ ID 2831, SEQ ID 2832, SEQ ID 2833, SEQ ID 2834, SEQ ID 2835, SEQ ID 2836, SEQ ID 2837, SEQ ID 2838, SEQ ID 2839, SEQ ID 2840, SEQ ID 2841, SEQ ID 2842, SEQ ID 2843, SEQ ID 2844, SEQ ID 2845, SEQ ID 2847, SEQ ID 2848, SEQ ID 2849, SEQ ID 2850, SEQ ID 2851, SEQ ID 2852, SEQ ID 2853, SEQ ID 2854, SEQ ID 2855, SEQ ID 2858, SEQ ID 2859, SEQ ID 2860, SEQ ID 2861, SEQ ID 2862, SEQ ID 2863, SEQ ID 2864, SEQ ID 2865, SEQ ID 2866, SEQ ID 2867, SEQ ID 2868, SEQ ID 2869, SEQ ID 2870, SEQ ID 2871, SEQ ID 2872, SEQ ID 2873, SEQ ID 2874, SEQ ID 2875, SEQ ID 2876, SEQ ID 2878, SEQ ID 2879, SEQ ID 2880, SEQ ID 2881, SEQ ID 2882, SEQ ID 2883, SEQ ID 2884, SEQ ID 2885, SEQ ID 2886, SEQ ID 2887, SEQ ID 2888, SEQ ID 2889, SEQ ID 2890, SEQ ID 2891, SEQ ID 2892, SEQ ID 2893, SEQ ID 2894, SEQ ID 2895, SEQ ID 2896, SEQ ID 2897, SEQ ID 2898, SEQ ID 2899, SEQ ID 2900, SEQ ID 2901, SEQ ID 2902, SEQ ID 2903, SEQ ID 2904, SEQ ID 2905, SEQ ID 2906, SEQ ID 2907, SEQ ID 2908, SEQ ID 2909, SEQ ID 2910, SEQ ID 2911, SEQ ID 2912, SEQ ID 2913, SEQ ID 2914, SEQ ID 2915, SEQ ID 2916, SEQ ID 2917, SEQ ID 2918, SEQ ID 2919, SEQ ID 2920, SEQ ID 2921, SEQ ID 2922, SEQ ID 2923, SEQ ID 2924, SEQ ID 2925, SEQ ID 2926, SEQ ID 2927, SEQ ID 2928, SEQ ID 2929, SEQ ID 2930, SEQ ID 2931, SEQ ID 2932, SEQ ID 2934, SEQ ID 2935, SEQ ID 2936, SEQ ID 2937, SEQ ID 2938, SEQ ID 2939, SEQ ID 2940, SEQ ID 2941, SEQ ID 2942, SEQ ID 2943, SEQ ID 2944, SEQ ID 2945, SEQ ID 2946, SEQ ID 2947, SEQ ID 2948, SEQ ID 2949, SEQ ID 2950, SEQ ID 2951, SEQ ID 2953, SEQ ID 2954, SEQ ID 2955, SEQ ID 2956, SEQ ID 2957, SEQ ID 2958, SEQ ID 2960, SEQ ID 2961, SEQ ID 2963, SEQ ID 2964, SEQ ID 2965, SEQ ID 2966, SEQ ID 2967, SEQ ID 2969, SEQ ID 2970, SEQ ID 2971, SEQ ID 2972, SEQ ID 2973, SEQ ID 2974, SEQ ID 2975, SEQ ID 2976, SEQ ID 2977, SEQ ID 2978, SEQ ID 2979, SEQ ID 2980, SEQ ID 2981, SEQ ID 2982, SEQ ID 2983, SEQ ID 2984, SEQ ID 2985, SEQ ID 3053, SEQ ID 3054, SEQ ID 3055, SEQ ID 3056, SEQ ID 3057, SEQ ID 3058, SEQ ID 3059, SEQ ID 3060, SEQ ID 3061, SEQ ID 3062, SEQ ID 3063, SEQ ID 3064, SEQ ID 3065, SEQ ID 3066, SEQ ID 3068, SEQ ID 3069, SEQ ID 3070, SEQ ID 3071, SEQ ID 3072, SEQ ID 3073, SEQ ID 3074, SEQ ID 3075, SEQ ID 3076, SEQ ID 3077, SEQ ID 3078, SEQ ID 3079, SEQ ID 3080, SEQ ID 3081, SEQ ID 3082, SEQ ID 3083, SEQ ID 3084, SEQ ID 3085, SEQ ID 3086, SEQ ID 3087, SEQ ID 3088, SEQ ID 3089, SEQ ID 3090, SEQ ID 3091, SEQ ID 3092, SEQ ID 3093, SEQ ID 3094, SEQ ID 3095, SEQ ID 3097, SEQ ID 3098, SEQ ID 3099, SEQ ID 3100, SEQ ID 3102, SEQ ID 3103, SEQ ID 3104, SEQ ID 3105, SEQ ID 3106, SEQ ID 3107, SEQ ID 3108, SEQ ID 3109, SEQ ID 3110, SEQ ID 3112, SEQ ID 3113, SEQ ID 3115, SEQ ID 3116, SEQ ID 3117, SEQ ID 3119, SEQ ID 3120, SEQ ID 3121, SEQ ID 3122, SEQ ID 3123, SEQ ID 3124, SEQ ID 3125, SEQ ID 3126, SEQ ID 3127, SEQ ID 3128, SEQ ID 3129, SEQ ID 3130, SEQ ID 3131, SEQ ID 3132, SEQ ID 3133, SEQ ID 3134, SEQ ID 3135, SEQ ID 3136, SEQ ID 3137, SEQ ID 3138, SEQ ID 3139, SEQ ID 3140, SEQ ID 3141, SEQ ID 3142, SEQ ID 3143, SEQ ID 3144, SEQ ID 3145, SEQ ID 3146, SEQ ID 3147, SEQ ID 3148, SEQ ID 3149, SEQ ID 3150, SEQ ID 3151, SEQ ID 3152, SEQ ID 3153, SEQ ID 3154, SEQ ID 3155, SEQ ID 3156, SEQ ID 3157, SEQ ID 3158, SEQ ID 3159, SEQ ID 3160, SEQ ID 3161, SEQ ID 3162, SEQ ID 3163, SEQ ID 3164, SEQ ID 3165, SEQ ID 3166, SEQ ID 3167, SEQ ID 3168, SEQ ID 3169, SEQ ID 3170, SEQ ID 3171, SEQ ID 3172, SEQ ID 3173, SEQ ID 3174, SEQ ID 3175, SEQ ID 3176, SEQ ID 3177, SEQ ID 3178, SEQ ID 3179, SEQ ID 3180, SEQ ID 3181, SEQ ID 3182, SEQ ID 3183, SEQ ID 3184, SEQ ID 3185, SEQ ID 3186, SEQ ID 3187, SEQ ID 3188, SEQ ID 3189, SEQ ID 3190, SEQ ID 3191, SEQ ID 3192, SEQ ID 3193, SEQ ID 3194, SEQ ID 3195, SEQ ID 3196, SEQ ID 3197, SEQ ID 3198, SEQ ID 3199, SEQ ID 3200, SEQ ID 3201, SEQ ID 3202, SEQ ID 3203, SEQ ID 3204, SEQ ID 3205, SEQ ID 3206, SEQ ID 3207, SEQ ID 3208, SEQ ID 3209, SEQ ID 3210, SEQ ID 3211, SEQ ID 3212, SEQ ID 3213, SEQ ID 3214, SEQ ID 3215, SEQ ID 3216, SEQ ID 3217, SEQ ID 3218, SEQ ID 3219, SEQ ID 3220, SEQ ID 3221, SEQ ID 3222, SEQ ID 3223, SEQ ID 3224, SEQ ID 3225, SEQ ID 3226, SEQ ID 3227, SEQ ID 3228, SEQ ID 3229, SEQ ID 3230, SEQ ID 3231, SEQ ID 3232, SEQ ID 3233, SEQ ID 3234, SEQ ID 3235, SEQ ID 3236, SEQ ID 3237, SEQ ID 3238, SEQ ID 3239, SEQ ID 3240, SEQ ID 3241, SEQ ID 3242, SEQ ID 3243, SEQ ID 3244, SEQ ID 3245, SEQ ID 3246, SEQ ID 3248, SEQ ID 3249, SEQ ID 3250, SEQ ID 3251, SEQ ID 3252, SEQ ID 3253, SEQ ID 3254, SEQ ID 3255, SEQ ID 3256, SEQ ID 3257, SEQ ID 3258, SEQ ID 3259, SEQ ID 3260, SEQ ID 3261, SEQ ID 3262, SEQ ID 3263, SEQ ID 3264, SEQ ID 3265, SEQ ID 3266, SEQ ID 3267, SEQ ID 3268, SEQ ID 3269, SEQ ID 3270, SEQ ID 3271, SEQ ID 3272, SEQ ID 3273, SEQ ID 3275, SEQ ID 3276, SEQ ID 3277, SEQ ID 3278, SEQ ID 3279, SEQ ID 3280, SEQ ID 3282, SEQ ID 3284, SEQ ID 3285, SEQ ID 3286, SEQ ID 3287, SEQ ID 3288, SEQ ID 3289, SEQ ID 3291, SEQ ID 3292, SEQ ID 3293, SEQ ID 3294, SEQ ID 3295, SEQ ID 3296, SEQ ID 3297, SEQ ID 3298, SEQ ID 3299, SEQ ID 3300, SEQ ID 3301, SEQ ID 3302, SEQ ID 3303, SEQ ID 3304, SEQ ID 3305, SEQ ID 3306, SEQ ID 3307, SEQ ID 3308, SEQ ID 3309, SEQ ID 3310, SEQ ID 3311, SEQ ID 3312, SEQ ID 3313, SEQ ID 3314, SEQ ID 3315, SEQ ID 3316, SEQ ID 3317, SEQ ID 3318, SEQ ID 3320, SEQ ID 3321, SEQ ID 3322, SEQ ID 3323, SEQ ID 3324, SEQ ID 3325, SEQ ID 3326, SEQ ID 3327, SEQ ID 3329, SEQ ID 3331, SEQ ID 3332, SEQ ID 3333, SEQ ID 3334, SEQ ID 3335, SEQ ID 3336, SEQ ID 3337, SEQ ID 3338, SEQ ID 3339, SEQ ID 3340, SEQ ID 3342, SEQ ID 3343, SEQ ID 3344, SEQ ID 3345, SEQ ID 3346, SEQ ID 3347, SEQ ID 3348, SEQ ID 3349, SEQ ID 3350, SEQ ID 3351, SEQ ID 3352, SEQ ID 3353, SEQ ID 3354, SEQ ID 3355, SEQ ID 3356, SEQ ID 3357, SEQ ID 3358, SEQ ID 3359, SEQ ID 3360, SEQ ID 3361, SEQ ID 3362, SEQ ID 3363, SEQ ID 3364, SEQ ID 3365, SEQ ID 3366, SEQ ID 3367, SEQ ID 3368, SEQ ID 3369, SEQ ID 3370, SEQ ID 3371, SEQ ID 3390, SEQ ID 3391, SEQ ID 3392, SEQ ID 3393, SEQ ID 3394, SEQ ID 3395, SEQ ID 3396, SEQ ID 3397, SEQ ID 3398, SEQ ID 3399, SEQ ID 3400, SEQ ID 3401, SEQ ID 3402, SEQ ID 3403, SEQ ID 3404, SEQ ID 3405, SEQ ID 3406, SEQ ID 3407, SEQ ID 3408, SEQ ID 3409, SEQ ID 3410, SEQ ID 3411, SEQ ID 3412, SEQ ID 3413, SEQ ID 3414, SEQ ID 3415, SEQ ID 3416, SEQ ID 3417, SEQ ID 3418, SEQ ID 3419, SEQ ID 3420, SEQ ID 3421, SEQ ID 3422, SEQ ID 3423, SEQ ID 3424, SEQ ID 3425, SEQ ID 3426, SEQ ID 3427, SEQ ID 3428, SEQ ID 3429, SEQ ID 3430, SEQ ID 3431, SEQ ID 3432, SEQ ID 3433, SEQ ID 3434, SEQ ID 3435, SEQ ID 3436, SEQ ID 3437, SEQ ID 3438, SEQ ID 3439, SEQ ID 3440, SEQ ID 3441, SEQ ID 3442, SEQ ID 3443, SEQ ID 3444, SEQ ID 3445, SEQ ID 3446, SEQ ID 3447, SEQ ID 3448, SEQ ID 3449, SEQ ID 3450, SEQ ID 3451, SEQ ID 3452, SEQ ID 3453, SEQ ID 3454, SEQ ID 3460, SEQ ID 3461, SEQ ID 3464, SEQ ID 3465, SEQ ID 3466, SEQ ID 3467, SEQ ID 3468, SEQ ID 3486, SEQ ID 3487, SEQ ID 3488, SEQ ID 3489, SEQ ID 3490, SEQ ID 3491, SEQ ID 3493, SEQ ID 3494, SEQ ID 3496, SEQ ID 3497, SEQ ID 3501, SEQ ID 3505, SEQ ID 3508, SEQ ID 3511, SEQ ID 3512, SEQ ID 3516, SEQ ID 3517, SEQ ID 3518, SEQ ID 3521, SEQ ID 3522, SEQ ID 3523, SEQ ID 3524, SEQ ID 3525, SEQ ID 3526, SEQ ID 3527, SEQ ID 3528, SEQ ID 3530, SEQ ID 3531, SEQ ID 3532, SEQ ID 3534, SEQ ID 3535, SEQ ID 3536, SEQ ID 3538, SEQ ID 3539, SEQ ID 3541, SEQ ID 3542, SEQ ID 3543, SEQ ID 3544, SEQ ID 3546, SEQ ID 3548, SEQ ID 3549, SEQ ID 3550, SEQ ID 3552, SEQ ID 3556, SEQ ID 3557, SEQ ID 3558, SEQ ID 3560, SEQ ID 3561, SEQ ID 3566, SEQ ID 3567, SEQ ID 3568, SEQ ID 3569, SEQ ID 3571, SEQ ID 3572, SEQ ID 3573, SEQ ID 3574, SEQ ID 3576, SEQ ID 3577, SEQ ID 3578, SEQ ID 3580, SEQ ID 3581, SEQ ID 3584, SEQ ID 3585, SEQ ID 3586, SEQ ID 3588, SEQ ID 3590, SEQ ID 3592, SEQ ID 3594, SEQ ID 3595, SEQ ID 3598, SEQ ID 3599, SEQ ID 3600, SEQ ID 3601, SEQ ID 3602, SEQ ID 3603, SEQ ID 3605, SEQ ID 3607, SEQ ID 3609, SEQ ID 3610, SEQ ID 3613, SEQ ID 3614, SEQ ID 3615, SEQ ID 3616, SEQ ID 3617, SEQ ID 3621, SEQ ID 3623, SEQ ID 3624, SEQ ID 3625, SEQ ID 3626, SEQ ID 3627, SEQ ID 3628, SEQ ID 3629, SEQ ID 3630, SEQ ID 3631, SEQ ID 3632, SEQ ID 3633, SEQ ID 3636, SEQ ID 3637, SEQ ID 3638, SEQ ID 3639, SEQ ID 3641, SEQ ID 3642, SEQ ID 3643, SEQ ID 3645, SEQ ID 3647, SEQ ID 3648, SEQ ID 3649, SEQ ID 3651, SEQ ID 3654, SEQ ID 3656, SEQ ID 3659, SEQ ID 3660, SEQ ID 3661, SEQ ID 3663, SEQ ID 3664, SEQ ID 3665, SEQ ID 3666, SEQ ID 3670, SEQ ID 3672, SEQ ID 3676, SEQ ID 3678, SEQ ID 3679, SEQ ID 3680, SEQ ID 3681, SEQ ID 3682, SEQ ID 3683, SEQ ID 3684, SEQ ID 3685, SEQ ID 3686, SEQ ID 3687, SEQ ID 3688, SEQ ID 3689, SEQ ID 3690, SEQ ID 3691, SEQ ID 3692, SEQ ID 3693, SEQ ID 3694, SEQ ID 3695, SEQ ID 3696, SEQ ID 3697, SEQ ID 3698, SEQ ID 3699, SEQ ID 3700, SEQ ID 3701, SEQ ID 3702, SEQ ID 3703, SEQ ID 3704, SEQ ID 3705, SEQ ID 3706, SEQ ID 3707, SEQ ID 3708, SEQ ID 3709, SEQ ID 3710, SEQ ID 3711, SEQ ID 3712, SEQ ID 3713, SEQ ID 3714, SEQ ID 3715, SEQ ID 3716, SEQ ID 3717, SEQ ID 3718, SEQ ID 3719, SEQ ID 3720, SEQ ID 3721, SEQ ID 3722, SEQ ID 3723, SEQ ID 3724, SEQ ID 3725, SEQ ID 3726, SEQ ID 3727, SEQ ID 3729, SEQ ID 3730, SEQ ID 3731, SEQ ID 3732, SEQ ID 3733, SEQ ID 3734, SEQ ID 3735, SEQ ID 3736, SEQ ID 3737, SEQ ID 3738, SEQ ID 3739, SEQ ID 3740, SEQ ID 3741, SEQ ID 3742, SEQ ID 3743, SEQ ID 3744, SEQ ID 3745, SEQ ID 3746, SEQ ID 3747, SEQ ID 3748, SEQ ID 3749, SEQ ID 3750, SEQ ID 3751, SEQ ID 3752, SEQ ID 3753, SEQ ID 3754, SEQ ID 3755, SEQ ID 3774, SEQ ID 3775, SEQ ID 3776, SEQ ID 3777, SEQ ID 3778, SEQ ID 3779, SEQ ID 3780, SEQ ID 3781, SEQ ID 3782, SEQ ID 3783, SEQ ID 3784, SEQ ID 3785, SEQ ID 3786, SEQ ID 3787, SEQ ID 3788, SEQ ID 3789, SEQ ID 3790, SEQ ID 3791, SEQ ID 3792, SEQ ID 3793, SEQ ID 3794, SEQ ID 3795, SEQ ID 3796, SEQ ID 3797, SEQ ID 3798, SEQ ID 3799, SEQ ID 3800, SEQ ID 3801, SEQ ID 3802, SEQ ID 3803, SEQ ID 3804, SEQ ID 3805, SEQ ID 3806, SEQ ID 3807, SEQ ID 3808, SEQ ID 3809, SEQ ID 3810, SEQ ID 3811, SEQ ID 3812, SEQ ID 3813, SEQ ID 3814, SEQ ID 3815, SEQ ID 3816, SEQ ID 3817, SEQ ID 3818, SEQ ID 3819, SEQ ID 3820, SEQ ID 3821, SEQ ID 3822, SEQ ID 3823, SEQ ID 3824, SEQ ID 3825, SEQ ID 3826, SEQ ID 3827, SEQ ID 3828, SEQ ID 3829, SEQ ID 3830, SEQ ID 3831, SEQ ID 3832, SEQ ID 3833, SEQ ID 3834, SEQ ID 3835, SEQ ID 3836, SEQ ID 3837, SEQ ID 3838, SEQ ID 3839, SEQ ID 3840, SEQ ID 3841, SEQ ID 3842, SEQ ID 3844, SEQ ID 3848, SEQ ID 3850, SEQ ID 3851, SEQ ID 3852, SEQ ID 3853, SEQ ID 3867, SEQ ID 3868, SEQ ID 3869, SEQ ID 3870, SEQ ID 3871, SEQ ID 3872, SEQ ID 3873, SEQ ID 3874, SEQ ID 3875, SEQ ID 3876, SEQ ID 3877, SEQ ID 3878, SEQ ID 3879, SEQ ID 3880, SEQ ID 3881, SEQ ID 3882, SEQ ID 3883, SEQ ID 3884, SEQ ID 3885, SEQ ID 3886, SEQ ID 3887, SEQ ID 3888, SEQ ID 3889, SEQ ID 3890, SEQ ID 3891, SEQ ID 3892, SEQ ID 3893, SEQ ID 3894, SEQ ID 3895, SEQ ID 3896, SEQ ID 3897, SEQ ID 3898, SEQ ID 3899, SEQ ID 3900, SEQ ID 3901, SEQ ID 3902, SEQ ID 3903, SEQ ID 3904, SEQ ID 3905, SEQ ID 3906, SEQ ID 3907, SEQ ID 3908, SEQ ID 3909, SEQ ID 3910, SEQ ID 3911, SEQ ID 3912, SEQ ID 3913, SEQ ID 3914, SEQ ID 3915, SEQ ID 3916, SEQ ID 3917, SEQ ID 3918, SEQ ID 3919, SEQ ID 3920, SEQ ID 3921, SEQ ID 3922, SEQ ID 3923, SEQ ID 3924, SEQ ID 3925, SEQ ID 3926, SEQ ID 3927, SEQ ID 3928, SEQ ID 3929, SEQ ID 3930, SEQ ID 3931, SEQ ID 3932, SEQ ID 3933, SEQ ID 3934, SEQ ID 3935, SEQ ID 3936, SEQ ID 3937, SEQ ID 3938, SEQ ID 3939, SEQ ID 3940, SEQ ID 3941, SEQ ID 3942, SEQ ID 3943, SEQ ID 3944, SEQ ID 3945, SEQ ID 3946, SEQ ID 3947, and SEQ ID 3948.

[0146] In some embodiments the target sequence is selected from the group consisting of SEQ ID 2321, SEQ ID 2335, SEQ ID 2336, SEQ ID 2337, SEQ ID 2338, SEQ ID 2339, SEQ ID 2348, SEQ ID 2349, SEQ ID 2351, SEQ ID 2352, SEQ ID 2353, SEQ ID 2354, SEQ ID 2355, SEQ ID 2358, SEQ ID 2360, SEQ ID 2364, SEQ ID 2365, SEQ ID 2366, SEQ ID 2367, SEQ ID 2369, SEQ ID 2371, SEQ ID 2373, SEQ ID 2375, SEQ ID 2386, SEQ ID 2387, SEQ ID 2388, SEQ ID 2389, SEQ ID 2394, SEQ ID 2403, SEQ ID 2426, SEQ ID 2428, SEQ ID 2429, SEQ ID 2430, SEQ ID 2431, SEQ ID 2432, SEQ ID 2435, SEQ ID 2440, SEQ ID 2441, SEQ ID 2442, SEQ ID 2444, SEQ ID 2446, SEQ ID 2447, SEQ ID 2450, SEQ ID 2451, SEQ ID 2452, SEQ ID 2453, SEQ ID 2454, SEQ ID 2455, SEQ ID 2456, SEQ ID 2458, SEQ ID 2459, SEQ ID 2461, SEQ ID 2463, SEQ ID 2464, SEQ ID 2465, SEQ ID 2466, SEQ ID 2467, SEQ ID 2468, SEQ ID 2469, SEQ ID 2470, SEQ ID 2471, SEQ ID 2472, SEQ ID 2473, SEQ ID 2474, SEQ ID 2475, SEQ ID 2476, SEQ ID 2477, SEQ ID 2478, SEQ ID 2482, SEQ ID 2483, SEQ ID 2484, SEQ ID 2485, SEQ ID 2487, SEQ ID 2489, SEQ ID 2494, SEQ ID 2495, SEQ ID 2496, SEQ ID 2497, SEQ ID 2499, SEQ ID 2501, SEQ ID 2502, SEQ ID 2504, SEQ ID 2506, SEQ ID 2507, SEQ ID 2508, SEQ ID 2509, SEQ ID 2511, SEQ ID 2513, SEQ ID 2515, SEQ ID 2516, SEQ ID 2518, SEQ ID 2519, SEQ ID 2520, SEQ ID 2521, SEQ ID 2523, SEQ ID 2525, SEQ ID 2534, SEQ ID 2537, SEQ ID 2544, SEQ ID 2546, SEQ ID 2554, SEQ ID 2555, SEQ ID 2556, SEQ ID 2560, SEQ ID 2561, SEQ ID 2562, SEQ ID 2595, SEQ ID 2626, SEQ ID 2628, SEQ ID 2629, SEQ ID 2630, SEQ ID 2631, SEQ ID 2633, SEQ ID 2638, SEQ ID 2639, SEQ ID 2640, SEQ ID 2649, SEQ ID 2651, SEQ ID 2652, SEQ ID 2655, SEQ ID 2658, SEQ ID 2665, SEQ ID 2666, SEQ ID 2667, SEQ ID 2669, SEQ ID 2670, SEQ ID 2676, SEQ ID 2677, SEQ ID 2678, SEQ ID 2679, SEQ ID 2682, SEQ ID 2686, SEQ ID 2688, SEQ ID 2689, SEQ ID 2691, SEQ ID 2694, SEQ ID 2698, SEQ ID 2699, SEQ ID 2700, SEQ ID 2701, SEQ ID 2703, SEQ ID 2706, SEQ ID 2709, SEQ ID 2711, SEQ ID 2712, SEQ ID 2713, SEQ ID 2714, SEQ ID 2719, SEQ ID 2720, SEQ ID 2721, SEQ ID 2737, SEQ ID 2739, SEQ ID 2740, SEQ ID 2741, SEQ ID 2742, SEQ ID 2743, SEQ ID 2744, SEQ ID 2745, SEQ ID 2746, SEQ ID 2747, SEQ ID 2748, SEQ ID 2749, SEQ ID 2750, SEQ ID 2751, SEQ ID 2752, SEQ ID 2753, SEQ ID 2754, SEQ ID 2755, SEQ ID 2756, SEQ ID 2757, SEQ ID 2758, SEQ ID 2760, SEQ ID 2763, SEQ ID 2764, SEQ ID 2765, SEQ ID 2766, SEQ ID 2767, SEQ ID 2768, SEQ ID 2769, SEQ ID 2770, SEQ ID 2771, SEQ ID 2772, SEQ ID 2774, SEQ ID 2816, SEQ ID 2817, SEQ ID 2818, SEQ ID 2819, SEQ ID 2820, SEQ ID 2824, SEQ ID 2828, SEQ ID 2829, SEQ ID 2830, SEQ ID 2831, SEQ ID 2832, SEQ ID 2833, SEQ ID 2834, SEQ ID 2835, SEQ ID 2836, SEQ ID 2837, SEQ ID 2851, SEQ ID 2852, SEQ ID 2866, SEQ ID 2871, SEQ ID 2872, SEQ ID 2886, SEQ ID 2887, SEQ ID 2890, SEQ ID 2891, SEQ ID 2892, SEQ ID 2895, SEQ ID 2896, SEQ ID 2899, SEQ ID 2904, SEQ ID 2910, SEQ ID 2911, SEQ ID 2912, SEQ ID 2913, SEQ ID 2914, SEQ ID 2916, SEQ ID 2918, SEQ ID 2919, SEQ ID 2920, SEQ ID 2922, SEQ ID 2925, SEQ ID 2926, SEQ ID 2932, SEQ ID 2939, SEQ ID 2941, SEQ ID 2942, SEQ ID 2943, SEQ ID 2972, SEQ ID 2973, SEQ ID 2974, SEQ ID 2975, SEQ ID 2976, SEQ ID 2977, SEQ ID 2980, SEQ ID 2983, SEQ ID 2985, SEQ ID 3053, SEQ ID 3054, SEQ ID 3055, SEQ ID 3056, SEQ ID 3058, SEQ ID 3059, SEQ ID 3060, SEQ ID 3061, SEQ ID 3062, SEQ ID 3063, SEQ ID 3064, SEQ ID 3065, SEQ ID 3066, SEQ ID 3068, SEQ ID 3069, SEQ ID 3070, SEQ ID 3071, SEQ ID 3072, SEQ ID 3073, SEQ ID 3074, SEQ ID 3075, SEQ ID 3076, SEQ ID 3077, SEQ ID 3078, SEQ ID 3079, SEQ ID 3082, SEQ ID 3083, SEQ ID 3084, SEQ ID 3085, SEQ ID 3088, SEQ ID 3089, SEQ ID 3090, SEQ ID 3091, SEQ ID 3092, SEQ ID 3095, SEQ ID 3097, SEQ ID 3102, SEQ ID 3106, SEQ ID 3108, SEQ ID 3110, SEQ ID 3116, SEQ ID 3120, SEQ ID 3121, SEQ ID 3125, SEQ ID 3126, SEQ ID 3133, SEQ ID 3134, SEQ ID 3135, SEQ ID 3137, SEQ ID 3138, SEQ ID 3140, SEQ ID 3141, SEQ ID 3142, SEQ ID 3143, SEQ ID 3145, SEQ ID 3148, SEQ ID 3152, SEQ ID 3153, SEQ ID 3156, SEQ ID 3157, SEQ ID 3158, SEQ ID 3159, SEQ ID 3160, SEQ ID 3161, SEQ ID 3162, SEQ ID 3163, SEQ ID 3164, SEQ ID 3165, SEQ ID 3166, SEQ ID 3167, SEQ ID 3168, SEQ ID 3169, SEQ ID 3170, SEQ ID 3172, SEQ ID 3173, SEQ ID 3174, SEQ ID 3175, SEQ ID 3176, SEQ ID 3177, SEQ ID 3178, SEQ ID 3179, SEQ ID 3180, SEQ ID 3181, SEQ ID 3182, SEQ ID 3183, SEQ ID 3184, SEQ ID 3186, SEQ ID 3188, SEQ ID 3191, SEQ ID 3193, SEQ ID 3196, SEQ ID 3197, SEQ ID 3203, SEQ ID 3205, SEQ ID 3206, SEQ ID 3207, SEQ ID 3210, SEQ ID 3211, SEQ ID 3212, SEQ ID 3213, SEQ ID 3214, SEQ ID 3215, SEQ ID 3216, SEQ ID 3217, SEQ ID 3218, SEQ ID 3219, SEQ ID 3221, SEQ ID 3222, SEQ ID 3223, SEQ ID 3224, SEQ ID 3227, SEQ ID 3236, SEQ ID 3237, SEQ ID 3238, SEQ ID 3239, SEQ ID 3240, SEQ ID 3241, SEQ ID 3242, SEQ ID 3243, SEQ ID 3244, SEQ ID 3245, SEQ ID 3246, SEQ ID 3248, SEQ ID 3249, SEQ ID 3250, SEQ ID 3251, SEQ ID 3252, SEQ ID 3254, SEQ ID 3258, SEQ ID 3259, SEQ ID 3261, SEQ ID 3263, SEQ ID 3265, SEQ ID 3266, SEQ ID 3267, SEQ ID 3271, SEQ ID 3272, SEQ ID 3273, SEQ ID 3276, SEQ ID 3277, SEQ ID 3279, SEQ ID 3286, SEQ ID 3295, SEQ ID 3297, SEQ ID 3305, SEQ ID 3307, SEQ ID 3309, SEQ ID 3312, SEQ ID 3313, SEQ ID 3314, SEQ ID 3316, SEQ ID 3317, SEQ ID 3318, SEQ ID 3320, SEQ ID 3332, SEQ ID 3335, SEQ ID 3336, SEQ ID 3337, SEQ ID 3338, SEQ ID 3339, SEQ ID 3340, SEQ ID 3342, SEQ ID 3343, SEQ ID 3345, SEQ ID 3346, SEQ ID 3347, SEQ ID 3348, SEQ ID 3349, SEQ ID 3350, SEQ ID 3351, SEQ ID 3352, SEQ ID 3353, SEQ ID 3354, SEQ ID 3355, SEQ ID 3356, SEQ ID 3359, SEQ ID 3360, SEQ ID 3361, SEQ ID 3362, SEQ ID 3363, SEQ ID 3364, SEQ ID 3365, SEQ ID 3366, SEQ ID 3369, SEQ ID 3370, SEQ ID 3390, SEQ ID 3392, SEQ ID 3393, SEQ ID 3394, SEQ ID 3395, SEQ ID 3396, SEQ ID 3397, SEQ ID 3398, SEQ ID 3399, SEQ ID 3401, SEQ ID 3403, SEQ ID 3404, SEQ ID 3407, SEQ ID 3408, SEQ ID 3409, SEQ ID 3410, SEQ ID 3411, SEQ ID 3412, SEQ ID 3413, SEQ ID 3414, SEQ ID 3415, SEQ ID 3417, SEQ ID 3419, SEQ ID 3420, SEQ ID 3422, SEQ ID 3423, SEQ ID 3424, SEQ ID 3428, SEQ ID 3429, SEQ ID 3430, SEQ ID 3432, SEQ ID 3433, SEQ ID 3434, SEQ ID 3435, SEQ ID 3436, SEQ ID 3437, SEQ ID 3439, SEQ ID 3440, SEQ ID 3441, SEQ ID 3442, SEQ ID 3443, SEQ ID 3444, SEQ ID 3445, SEQ ID 3446, SEQ ID 3447, SEQ ID 3448, SEQ ID 3449, SEQ ID 3450, SEQ ID 3451, SEQ ID 3452, SEQ ID 3460, SEQ ID 3461, SEQ ID 3466, SEQ ID 3467, SEQ ID 3468, SEQ ID 3490, SEQ ID 3494, SEQ ID 3496, SEQ ID 3501, SEQ ID 3505, SEQ ID 3511, SEQ ID 3512, SEQ ID 3516, SEQ ID 3517, SEQ ID 3521, SEQ ID 3522, SEQ ID 3556, SEQ ID 3557, SEQ ID 3561, SEQ ID 3566, SEQ ID 3567, SEQ ID 3568, SEQ ID 3569, SEQ ID 3571, SEQ ID 3572, SEQ ID 3576, SEQ ID 3578, SEQ ID 3580, SEQ ID 3584, SEQ ID 3594, SEQ ID 3613, SEQ ID 3614, SEQ ID 3624, SEQ ID 3625, SEQ ID 3626, SEQ ID 3627, SEQ ID 3628, SEQ ID 3633, SEQ ID 3641, SEQ ID 3643, SEQ ID 3648, SEQ ID 3651, SEQ ID 3654, SEQ ID 3656, SEQ ID 3659, SEQ ID 3660, SEQ ID 3661, SEQ ID 3670, SEQ ID 3676, SEQ ID 3680, SEQ ID 3681, SEQ ID 3683, SEQ ID 3684, SEQ ID 3685, SEQ ID 3686, SEQ ID 3687, SEQ ID 3688, SEQ ID 3689, SEQ ID 3691, SEQ ID 3693, SEQ ID 3694, SEQ ID 3695, SEQ ID 3696, SEQ ID 3698, SEQ ID 3700, SEQ ID 3701, SEQ ID 3703, SEQ ID 3704, SEQ ID 3707, SEQ ID 3708, SEQ ID 3709, SEQ ID 3710, SEQ ID 3711, SEQ ID 3712, SEQ ID 3713, SEQ ID 3714, SEQ ID 3715, SEQ ID 3716, SEQ ID 3717, SEQ ID 3718, SEQ ID 3719, SEQ ID 3720, SEQ ID 3721, SEQ ID 3722, SEQ ID 3723, SEQ ID 3725, SEQ ID 3744, SEQ ID 3747, SEQ ID 3748, SEQ ID 3749, SEQ ID 3750, SEQ ID 3751, SEQ ID 3752, SEQ ID 3753, SEQ ID 3754, SEQ ID 3755, SEQ ID 3774, SEQ ID 3775, SEQ ID 3776, SEQ ID 3786, SEQ ID 3788, SEQ ID 3790, SEQ ID 3791, SEQ ID 3793, SEQ ID 3794, SEQ ID 3795, SEQ ID 3796, SEQ ID 3797, SEQ ID 3798, SEQ ID 3799, SEQ ID 3800, SEQ ID 3801, SEQ ID 3802, SEQ ID 3803, SEQ ID 3804, SEQ ID 3805, SEQ ID 3809, SEQ ID 3810, SEQ ID 3811, SEQ ID 3812, SEQ ID 3813, SEQ ID 3814, SEQ ID 3815, SEQ ID 3821, SEQ ID 3822, SEQ ID 3823, SEQ ID 3824, SEQ ID 3825, SEQ ID 3826, SEQ ID 3827, SEQ ID 3828, SEQ ID 3830, SEQ ID 3831, SEQ ID 3832, SEQ ID 3834, SEQ ID 3836, SEQ ID 3837, SEQ ID 3838, SEQ ID 3839, SEQ ID 3840, SEQ ID 3841, SEQ ID 3842, SEQ ID 3844, SEQ ID 3850, SEQ ID 3852, SEQ ID 3867, SEQ ID 3868, SEQ ID 3870, SEQ ID 3871, SEQ ID 3872, SEQ ID 3873, SEQ ID 3874, SEQ ID 3875, SEQ ID 3876, SEQ ID 3879, SEQ ID 3880, SEQ ID 3881, SEQ ID 3882, SEQ ID 3883, SEQ ID 3884, SEQ ID 3885, SEQ ID 3886, SEQ ID 3887, SEQ ID 3888, SEQ ID 3889, SEQ ID 3890, SEQ ID 3891, SEQ ID 3892, SEQ ID 3893, SEQ ID 3894, SEQ ID 3895, SEQ ID 3896, SEQ ID 3897, SEQ ID 3908, SEQ ID 3909, SEQ ID 3910, SEQ ID 3911, SEQ ID 3912, SEQ ID 3913, SEQ ID 3922, SEQ ID 3923, SEQ ID 3930, SEQ ID 3935, SEQ ID 3936, SEQ ID 3937, SEQ ID 3938, SEQ ID 3939, SEQ ID 3940, SEQ ID 3944, SEQ ID 3945, SEQ ID 3946, SEQ ID 3947, and SEQ ID 3948.

[0147] In some embodiments the oligonucleotide comprises the contiguous nucleotide sequence, and may optionally comprise further nucleotide(s), for example a nucleotide linker region which may be used to attach a functional group (e.g. a conjugate group) to the contiguous nucleotide sequence. The nucleotide linker region may or may not be complementary to the target nucleic acid. It is understood that the contiguous nucleotide sequence of the oligonucleotide cannot be longer than the oligonucleotide as such and that the oligonucleotide cannot be shorter than the contiguous nucleotide sequence.

### Nucleotides and Nucleosides

[0148] Nucleotides and nucleosides are the building blocks of oligonucleotides and polynucleotides, and for the purposes of the present invention include both naturally occurring and non-naturally occurring nucleotides and nucleosides. In nature, nucleotides, such as DNA and RNA nucleotides comprise a ribose sugar moiety, a nucleobase moiety and one or more phosphate groups (which is absent in nucleosides). Nucleosides and nucleotides may also interchangeably be referred to as “units” or “monomers”.

### Modified Nucleoside

[0149] Advantageously, the antisense oligonucleotide progranulin agonist of the invention may comprise one or more modified nucleoside.

[0150] The term “modified nucleoside” or “nucleoside modification” as used herein refers to nucleosides modified as compared to the equivalent DNA or RNA nucleoside by the introduction of one or more modifications of the sugar moiety or the (nucleo)base moiety. Advantageously, one or more of the modified nucleosides of the antisense oligonucleotides of the invention may comprise a modified sugar moiety. The term modified nucleoside may also be used herein interchangeably with the term “nucleoside analogue” or modified “units” or modified “monomers”. Nucleosides with an unmodified DNA or RNA sugar moiety are termed DNA or RNA nucleosides herein. Nucleosides with modifications in the base region of the DNA or RNA nucleoside are still generally termed DNA or RNA if they allow Watson Crick base pairing. Exemplary modified nucleosides which may be used in the antisense oligonucleotide progranulin agonists of the invention include LNA, 2′-O-MOE, 2′oMe and morpholino nucleoside analogues.

### Modified Internucleoside Linkage

[0151] Advantageously, the antisense oligonucleotide progranulin agonist of the invention comprises one or more modified internucleoside linkage.

[0152] The term “modified internucleoside linkage” is defined as generally understood by the skilled person as linkages other than phosphodiester (PO) linkages, that covalently couple two nucleosides together. The antisense oligonucleotide progranulin agonists of the invention may therefore comprise one or more modified internucleoside linkages such as one or more phosphorothioate internucleoside linkage.

[0153] In some embodiments at least 50% of the internucleoside linkages in the antisense oligonucleotide progranulin agonist, or contiguous nucleotide sequence thereof, are phosphorothioate, such as at least 60%, such as at least 70%, such as at least 75%, such as at least 80%, such as at least 90% or more of the internucleoside linkages in the antisense oligonucleotide progranulin agonist, or contiguous nucleotide sequence thereof, are phosphorothioate. In some embodiments all of the internucleoside linkages of the antisense oligonucleotide progranulin agonist, or contiguous nucleotide sequence thereof, are phosphorothioate.

[0154] Advantageously, all the internucleoside linkages of the contiguous nucleotide sequence of the antisense oligonucleotide progranulin agonist may be phosphorothioate, or all the internucleoside linkages of the antisense oligonucleotide progranulin agonist may be phosphorothioate linkages.

### Nucleobase

[0155] The term nucleobase includes the purine (e.g. adenine and guanine) and pyrimidine (e.g. uracil, thymine and cytosine) moiety present in nucleosides and nucleotides which form hydrogen bonds in nucleic acid hybridization. In the context of the present invention the term nucleobase also encompasses modified nucleobases which may differ from naturally occurring nucleobases, but which are functional during nucleic acid hybridization. In this context “nucleobase” refers to both naturally occurring nucleobases such as adenine, guanine, cytosine, thymidine, uracil, xanthine and hypoxanthine, as well as non-naturally occurring variants. Such variants are for example described in Hirao et al (2012) Accounts of Chemical Research vol 45 page 2055 and Bergstrom (2009) Current Protocols in Nucleic Acid Chemistry Suppl. 37 1.4.1.

[0156] In some embodiments the nucleobase moiety is modified by changing the purine or pyrimidine into a modified purine or pyrimidine, such as substituted purine or substituted pyrimidine, such as a nucleobase selected from isocytosine, pseudoisocytosine. 5-methyl cytosine. 5-thiozolo-cytosine, 5-propynyl-cytosine, 5-propynyl-uracil, 5-bromouracil 5-thiazolo-uracil, 2-thio-uracil, 2′thio-thymine, inosine, diaminopurine, 6-aminopurine. 2-aminopurine, 2,6-diaminopurine and 2-chloro-6-aminopurine.

[0157] The nucleobase moieties may be indicated by the letter code for each corresponding nucleobase, e.g. A, T, G, C or U, wherein each letter may optionally include modified nucleobases of equivalent function. For example, in the exemplified oligonucleotides, the nucleobase moieties are selected from A, T, G, C, and 5-methyl cytosine. Optionally, for LNA gapmers, 5-methyl cytosine LNA nucleosides may be used.

### Modified Oligonucleotide

[0158] The antisense oligonucleotide progranulin agonist of the invention may be a modified oligonucleotide.

[0159] The term modified oligonucleotide describes an oligonucleotide comprising one or more sugar-modified nucleosides and/or modified internucleoside linkages. The term “chimeric oligonucleotide” is a term that has been used in the literature to describe oligonucleotides comprising sugar modified nucleosides and DNA nucleosides. In some embodiments, it may be advantageous for the antisense oligonucleotide progranulin agonist of the invention to be a chimeric oligonucleotide.

### Complementarity

[0160] The term “complementarity” describes the capacity for Watson-Crick base-pairing of nucleosides/nucleotides. Watson-Crick base pairs are guanine (G)-cytosine (C) and adenine (A)-thymine (T)/uracil (U).

[0161] It will be understood that oligonucleotides may comprise nucleosides with modified nucleobases, for example 5-methyl cytosine is often used in place of cytosine, and as such the term complementarity encompasses Watson Crick base-paring between non-modified and modified nucleobases (see for example Hirao et al (2012) Accounts of Chemical Research vol 45 page 2055 and Bergstrom (2009) Current Protocols in Nucleic Acid Chemistry Suppl. 37 1.4.1).

[0162] The term “% complementary” as used herein, refers to the proportion of nucleotides (in percent) of a contiguous nucleotide sequence in a nucleic acid molecule (e.g. oligonucleotide) which across the contiguous nucleotide sequence, are complementary to a reference sequence (e.g. a target sequence or sequence motif). The percentage of complementarity is thus calculated by counting the number of aligned nucleobases that are complementary (from Watson Crick base pairs) between the two sequences (when aligned with the target sequence 5′-3′ and the oligonucleotide sequence from 3′-5′), dividing that number by the total number of nucleotides in the oligonucleotide and multiplying by 100. In such a comparison a nucleobase/nucleotide which does not align (form a base pair) is termed a mismatch. Insertions and deletions are not allowed in the calculation of % complementarity of a contiguous nucleotide sequence. It will be understood that in determining complementarity, chemical modifications of the nucleobases are disregarded as long as the functional capacity of the nucleobase to form Watson Crick base pairing is retained (e.g. 5′-methyl cytosine is considered identical to a cytosine for the purpose of calculating % identity).

[0163] Within the present invention the term “complementary” requires the antisense oligonucleotide progranulin agonist to be at least about 80% complementary, or at least about 90% complementary, to a human progranulin precursor-mRNA (pre-mRNA) or mature mRNA transcript. In some embodiments the antisense oligonucleotide progranulin agonist may be at least about 80%, at least about 81%, at least about 82%, at least about 83%, at least about 84%, at least about 85%, at least about 86%, at least about 87%, at least about 88%, at least about 89%, at least about 90%, at least about 91%, at least about 92%, at least about 93%, at least about 94%, at least about 95%, at least about 96%, at least about 97%, at least about 98% or at least about 99% complementary to a human progranulin precursor-mRNA (pre-mRNA) or mature mRNA transcript. Put another way, for some embodiments, an antisense oligonucleotide progranulin agonist of the invention may include one, two, three or more mis-matches, wherein a mis-match is a nucleotide within the antisense oligonucleotide progranulin agonist of the invention which does not base pair with its target.

[0164] The term “fully complementary”, refers to 100% complementarity.

[0165] The antisense oligonucleotide progranulin agonists of the invention are advantageously complementary to the human progranulin precursor mRNA (pre-mRNA) or the human progranulin mature mRNA sequence. The human progranulin mature mRNA sequence is exemplified herein as SEQ ID NO 1. The human progranulin precursor-mRNA (pre-mRNA) sequence is exemplified herein as SEQ ID NO 3949, SEQ ID NO 1 and SEQ ID NO 3949 are provided herein as reference sequences and it will be understood that the target progranulin nucleic acid may be an allelic variant of SEQ ID NO 1 or SEQ ID NO 3949, such as an allelic variant which comprises one or more polymorphism in the human progranulin nucleic acid sequence.

### Identity

[0166] The term “identity” as used herein, refers to the proportion of nucleotides (expressed in percent) of a contiguous nucleotide sequence in a nucleic acid molecule (e.g. oligonucleotide) which across the contiguous nucleotide sequence, are identical to a reference sequence (e.g. a sequence motif).

[0167] The percentage of identity is thus calculated by counting the number of aligned nucleobases that are identical (a Match) between two sequences (in the contiguous nucleotide sequence of the compound of the invention and in the reference sequence), dividing that number by the total number of nucleotides in the oligonucleotide and multiplying by 100. Therefore, Percentage of Identity=(Matches×100)/Length of aligned region (e.g. the contiguous nucleotide sequence). Insertions and deletions are not allowed in the calculation the percentage of identity of a contiguous nucleotide sequence. It will be understood that in determining identity, chemical modifications of the nucleobases are disregarded as long as the functional capacity of the nucleobase to form Watson Crick base pairing is retained (e.g. 5-methyl cytosine is considered identical to a cytosine for the purpose of calculating % identity).

### Hybridization

[0168] The terms “hybridizing” or “hybridizes” as used herein are to be understood as two nucleic acid strands (e.g. an oligonucleotide and a target nucleic acid) forming hydrogen bonds between base pairs on opposite strands thereby forming a duplex. The affinity of the binding between two nucleic acid strands is the strength of the hybridization. It is often described in terms of the melting temperature (Tₘ) defined as the temperature at which half of the oligonucleotides are duplexed with the target nucleic acid. At physiological conditions Tₘ is not strictly proportional to the affinity (Mergny and Lacroix, 2003, Oligonucleotides 13:515-537). The standard state Gibbs free energy ΔG° is a more accurate representation of binding affinity and is related to the dissociation constant (K) of the reaction by ΔG°=−RT ln(K_{d}), where R is the gas constant and T is the absolute temperature. Therefore, a very low ΔG° of the reaction between an oligonucleotide and the target nucleic acid reflects a strong hybridization between the oligonucleotide and target nucleic acid. ΔG° is the energy associated with a reaction where aqueous concentrations are 1M, the pH is 7, and the temperature is 37° C. The hybridization of oligonucleotides to a target nucleic acid is a spontaneous reaction and for spontaneous reactions ΔG° is less than zero. ΔG° can be measured experimentally, for example, by use of the isothermal titration calorimetry (ITC) method as described in Hansen et al., 1965, Chem. Comm. 36-38 and Holdgate et al., 2005, Drug Discov Today. The skilled person will know that commercial equipment is available for ΔG° measurements. ΔG° can also be estimated numerically by using the nearest neighbor model as described by SantaLucia, 1998, Proc Natl Aced Sci USA. 95: 1460-1465 using appropriately derived thermodynamic parameters described by Sugimoto et al., 1995, Biochemistry 34:11211-11216 and McTigue et al., 2004, Biochemistry 43:5388-5405.

[0169] In some embodiments, antisense oligonucleotide progranulin agonists of the present invention hybridize to a target nucleic acid with estimated ΔG° values below −10 kcal for oligonucleotides that are 10-30 nucleotides in length.

[0170] In some embodiments the degree or strength of hybridization is measured by the standard state Gibbs free energy ΔG°. The oligonucleotides may hybridize to a target nucleic acid with estimated ΔG° values below the range of −10 kcal, such as below −15 kcal, such as below −20 kcal and such as below −25 kcal for oligonucleotides that are 8-30 nucleotides in length. In some embodiments the oligonucleotides hybridize to a target nucleic acid with an estimated ΔG° value of −10 to −60 kcal, such as −12 to −40, such as from −15 to −30 kcal, or −16 to −27 kcal such as −18 to −25 kcal.

### High Affinity Modified Nucleosides

[0171] A high affinity modified nucleoside is a modified nucleotide which, when incorporated into the oligonucleotide enhances the affinity of the oligonucleotide for its complementary target, for example as measured by the melting temperature (T^{m}). A high affinity modified nucleoside of the present invention preferably results in an increase in melting temperature between +0.5 to +12° C., more preferably between +1.5 to +10° C. and most preferably between +3 to +8° C. per modified nucleoside. Numerous high affinity modified nucleosides are known in the art and include for example, many 2′ substituted nucleosides as well as locked nucleic acids (LNA) (see e.g. Freier & Altmann; Nucl. Acid Res., 1997, 25, 4429-4443 and Uhlmann; Curr. Opinion in Drug Development, 2000, 3(2), 293-213).

### Sugar Modifications

[0172] The antisense oligonucleotide progranulin agonist of the invention may comprise one or more nucleosides which have a modified sugar moiety, i.e. a modification of the sugar moiety when compared to the ribose sugar moiety found in DNA and RNA.

[0173] Numerous nucleosides with modification of the ribose sugar moiety have been made, primarily with the aim of improving certain properties of oligonucleotides, such as affinity and/or nuclease resistance.

[0174] Such modifications include those where the ribose ring structure is modified, e.g. by replacement with a hexose ring (HNA), or a bicyclic ring, which typically have a biradicle bridge between the C2 and C4 carbons on the ribose ring (LNA), or an unlinked ribose ring which typically lacks a bond between the C2 and C3 carbons (e.g. UNA). Other sugar modified nucleosides include, for example, bicyclohexose nucleic acids (WO2011/017521) or tricyclic nucleic acids (WO2013/154798). Modified nucleosides also include nucleosides where the sugar moiety is replaced with a non-sugar moiety, for example in the case of peptide nucleic acids (PNA), or morpholino nucleic acids.

[0175] Sugar modifications also include modifications made via altering the substituent groups on the ribose ring to groups other than hydrogen, or the 2′-OH group naturally found in DNA and RNA nucleosides. Substituents may, for example be introduced at the 2′, 3′, 4′ or 5′ positions.

### 2′ Sugar Modified Nucleosides

[0176] A 2′ sugar modified nucleoside is a nucleoside which has a substituent other than H or —OH at the 2′ position (2′ substituted nucleoside) or comprises a 2′ linked biradicle capable of forming a bridge between the 2′ carbon and a second carbon in the ribose ring, such as LNA (2′-4′ biradicle bridged) nucleosides.

[0177] Indeed, much focus has been spent on developing 2′ sugar substituted nucleosides, and numerous 2′ substituted nucleosides have been found to have beneficial properties when incorporated into oligonucleotides. For example, the 2′ modified sugar may provide enhanced binding affinity and/or increased nuclease resistance to the oligonucleotide. Examples of 2′ substituted modified nucleosides are 2′-O-alkyl-RNA, 2′-O-methyl-RNA (2′oMe), 2′-alkoxy-RNA, 2′-O-methoxyethyl-RNA (MOE), 2′-amino-DNA, 2′-Fluoro-RNA, and 2′-F-ANA nucleoside. For further examples, please see e.g. Freier & Altmann; Nucl. Acid Res., 1997, 25, 4429-4443 and Uhlmann; Curr. Opinion in Drug Development, 2000, 3(2), 293-213, and Deleavey and Damha, Chemistry and Biology 2012, 19, 937. Below are illustrations of some 2′ substituted modified nucleosides.

[chemical structure]

[0178] In relation to the present invention 2′ substituted sugar modified nucleosides does not include 2′ bridged nucleosides like LNA.

### Locked Nucleic Acid Nucleosides (LNA Nucleoside)

[0179] A “LNA nucleoside” is a 2′-modified nucleoside which comprises a biradical linking the C2′ and C4′ of the ribose sugar ring of said nucleoside (also referred to as a “2′-4′ bridge”), which restricts or locks the conformation of the ribose ring. These nucleosides are also termed bridged nucleic acid or bicyclic nucleic acid (BNA) in the literature. The locking of the conformation of the ribose is associated with an enhanced affinity of hybridization (duplex stabilization) when the LNA is incorporated into an oligonucleotide for a complementary RNA or DNA molecule. This can be routinely determined by measuring the melting temperature of the oligonucleotide/complement duplex.

[0180] Non limiting, exemplary LNA nucleosides are disclosed in WO 99/014226, WO 00/66604, WO 98/039352, WO 2004/046160, WO 00/047599, WO 2007/134181, WO 2010/077578. WO 2010/036698, WO 2007/090071, WO 2009/006478, WO 2011/156202, WO 2008/154401, WO 2009/067647. WO 2008/150729, Morita et al., Bioorganic & Med. Chem. Lett. 12, 73-76. Seth et al. J. Org. Chem. 2010, Vol 75(5) pp. 1569-81, and Mitsuoka et al., Nucleic Acids Research 2009, 37(4), 1225-1238, and Wan and Seth, J. Medical Chemistry 2016, 59, 9645-9667.

[0181] Further non limiting, exemplary LNA nucleosides are disclosed in Scheme 1.

[chemical structure]

[0182] Particular LNA nucleosides are beta-D-oxy-LNA, 6′-methyl-beta-D-oxy LNA such as (S)-6′-methyl-beta-D-oxy-LNA (ScET) and ENA.

[0183] A particularly advantageous LNA is beta-D-oxy-LNA.

### Morpholino Oligonucleotides

[0184] In some embodiments, the antisense oligonucleotide progranulin agonist of the invention comprises or consists of morpholino nucleosides (i.e. is a Morpholino oligomer and as a phosphorodiamidate Morpholino oligomer (PMO)). Splice modulating morpholino oligonucleotides have been approved for clinical use—see for example eteplirsen, a 30 nt morpholino oligonucleotide targeting a frame shift mutation in DMD, used to treat Duchenne muscular dystrophy. Morpholino oligonucleotides have nucleobases attached to six membered morpholine rings rather ribose, such as methylenemorpholine rings linked through phosphorodiamidate groups, for example as illustrated by the following illustration of 4 consecutive morpholino nucleotides:

[chemical structure]

[0185] In some embodiments, morpholino oligonucleotides of the invention may be, for example 20-40 morpholino nucleotides in length, such as morpholino 25-35 nucleotides in length.

### Rnase H Activity and Recruitment

[0186] The RNase H activity of an antisense oligonucleotide refers to its ability to recruit RNase H when in a duplex with a complementary RNA molecule. WO01/23613 provides in vitro methods for determining RNaseH activity, which may be used to determine the ability to recruit RNaseH. Typically an oligonucleotide is deemed capable of recruiting RNase H if it, when provided with a complementary target nucleic acid sequence, has an initial rate, as measured in pmol/l/min, of at least 5%, such as at least 10%, at least 20% or more than 20%, of the initial rate determined when using an oligonucleotide having the same base sequence as the modified oligonucleotide being tested, but containing only DNA monomers with phosphorothioate linkages between all monomers in the oligonucleotide, and using the methodology provided by Examples 91-95 of WO01/23613 (hereby incorporated by reference). For use in determining RHase H activity, recombinant RNase H1 is available from Lubio Science GmbH, Lucerne, Switzerland.

[0187] DNA oligonucleotides are known to effectively recruit RNaseH, as are gapmer oligonucleotides which comprise a region of DNA nucleosides (typically at least 5 or 6 contiguous DNA nucleosides), flanked 5′ and 3′ by regions comprising 2′ sugar modified nucleosides, typically high affinity 2′ sugar modified nucleosides, such as 2-O-MOE and/or LNA. For effective modulation of splicing, degradation of the pre-mRNA is not desirable, and as such it is preferable to avoid the RNaseH degradation of the target. Therefore, the antisense oligonucleotide progranulin agonists of the invention are not RNaseH recruiting gapmer oligonucleotide.

[0188] RNaseH recruitment may be avoided by limiting the number of contiguous DNA nucleotides in the oligonucleotide—therefore mixmers and totalmer designs may be used. Advantageously the antisense oligonucleotide progranulin agonist of the invention, or the contiguous nucleotide sequence thereof, do not comprise more than 3 contiguous DNA nucleosides. Further, advantageously the antisense oligonucleotide progranulin agonists of the invention, or the contiguous nucleotide sequence thereof, do not comprise more than 4 contiguous DNA nucleosides. Further advantageously, the progranulin agonist antisense oligonucleotide agonists of the invention, or contiguous nucleotide sequence thereof, do not comprise more than 2 contiguous DNA nucleosides.

### Mixmers and Totalmers

[0189] For splice modulation it is often advantageous to use antisense oligonucleotides which do not recruit RNAaseH. As RNaseH activity requires a contiguous sequence of DNA nucleotides, RNaseH activity of antisense oligonucleotide may be achieved by designing antisense oligonucleotides which do not comprise a region of more than 3 or more than 4 contiguous DNA nucleosides. This may be achieved by using antisense oligonucleotides or contiguous nucleoside regions thereof with a mixmer design, which comprise sugar modified nucleosides, such as 2′ sugar modified nucleosides, and short regions of DNA nucleosides, such as 1, 2 or 3 DNA nucleosides. Mixmers are exemplified herein by every second design, wherein the nucleosides alternate between 1 LNA and 1 DNA nucleoside, e.g. LDLDLDLDLDLDLDLL, with 5′ and 3′ terminal LNA nucleosides, and every third design, such as LDDLDDLDDLDDLDDL, where every third nucleoside is a LNA nucleoside.

[0190] A totalmer is an antisense oligonucleotide or a contiguous nucleotide sequence thereof which does not comprise DNA or RNA nucleosides, and may for example comprise only 2′-O-MOE nucleosides, such as a fully MOE phosphorothioate, e.g. MMMMMMMMMMMMMMMMMMMM, where M=2′-O-MOE, or may for example comprise only 2′oMe nucleosides, which are reported to be effective splice modulators for therapeutic use.

[0191] Alternatively, a mixmer may comprise a mixture of modified nucleosides, such as MLMLMLMLMLMLMLMLMLML, wherein L=LNA and M=2′-O-MOE nucleosides. Advantageously, the internucleoside nucleosides in mixmers and totalmers may be phosphorothioate, or a majority of nucleoside linkages in mixmers may be phosphorothioate. Mixmers and totalmers may comprise other internucleoside linkages, such as phosphodiester or phosphorodithioate, by way of example.

### Region D′ or D″ in an Oligonucleotide

[0192] The antisense oligonucleotide progranulin agonist of the invention may in some embodiments comprise or consist of the contiguous nucleotide sequence of the oligonucleotide which is complementary to the target nucleic acid, such as a mixmer or totalmer region, and further 5′ and/or 3′ nucleosides. The further 5′ and/or 3′ nucleosides may or may not be complementary, such as fully complementary, to the target nucleic acid. Such further 5′ and/or 3′ nucleosides may be referred to as region D′ and D″ herein.

[0193] The addition of region D′ or D″ may be used for the purpose of joining the contiguous nucleotide sequence, such as the mixmer or totalmer, to a conjugate moiety or another functional group. When used for joining the contiguous nucleotide sequence with a conjugate moiety is can serve as a biocleavable linker. Alternatively, it may be used to provide exonuclease protection or for ease of synthesis or manufacture.

[0194] Region D′ or D″ may independently comprise or consist of 1, 2, 3, 4 or 5 additional nucleotides, which may be complementary or non-complementary to the target nucleic acid. The nucleotide adjacent to the F or F′ region is not a sugar-modified nucleotide, such as a DNA or RNA or base modified versions of these. The D′ or D′ region may serve as a nuclease susceptible biocleavable linker (see definition of linkers). In some embodiments the additional 5′ and/or 3′ end nucleotides are linked with phosphodiester linkages, and are DNA or RNA. Nucleotide based biocleavable linkers suitable for use as region D′ or D″ are disclosed in WO2014/076195, which include by way of example a phosphodiester linked DNA dinucleotide. The use of biocleavable linkers in poly-oligonucleotide constructs is disclosed in WO2015/113922, where they are used to link multiple antisense constructs within a single oligonucleotide.

[0195] In one embodiment the antisense oligonucleotide progranulin agonist of the invention comprises a region D′ and/or D″ in addition to the contiguous nucleotide sequence which constitutes a mixmer or a totalmer.

[0196] In some embodiments the internucleoside linkage positioned between region D′ or D″ and the mixmer or totalmer region is a phosphodiester linkage.

### Conjugate

[0197] The invention encompasses an antisense oligonucleotide progranulin agonist covalently attached to at least one conjugate moiety. In some embodiments this may be referred to as a conjugate of the invention.

[0198] The term “conjugate” as used herein refers to an antisense oligonucleotide progranulin agonist which is covalently linked to a non-nucleotide moiety (conjugate moiety or region C or third region). The conjugate moiety may be covalently linked to the antisense oligonucleotide, optionally via a linker group, such as region D′ or D″.

[0199] Oligonucleotide conjugates and their synthesis has also been reported in comprehensive reviews by Manoharan in Antisense Drug Technology, Principles, Strategies, and Applications, S. T. Crooke, ed., Ch. 16, Marcel Dekker, Inc., 2001 and Manoharan, Antisense and Nucleic Acid Drug Development, 2002, 12, 103.

[0200] In some embodiments, the non-nucleotide moiety (conjugate moiety) is selected from the group consisting of carbohydrates (e.g. GalNAc), cell surface receptor ligands, drug substances, hormones, lipophilic substances, polymers, proteins, peptides, toxins (e.g. bacterial toxins), vitamins, viral proteins (e.g. capsids) or combinations thereof.

### Linkers

[0201] A linkage or linker is a connection between two atoms that links one chemical group or segment of interest to another chemical group or segment of interest via one or more covalent bonds. Conjugate moieties can be attached to the antisense oligonucleotide progranulin agonist directly or through a linking moiety (e.g. linker or tether). Linkers serve to covalently connect a third region, e.g. a conjugate moiety (Region C), to a first region, e.g. an oligonucleotide or contiguous nucleotide sequence complementary to the target nucleic acid (region A).

[0202] In some embodiments of the invention the conjugate or antisense oligonucleotide progranulin agonist conjugate of the invention may optionally comprise a linker region (second region or region B and/or region Y) which is positioned between the oligonucleotide or contiguous nucleotide sequence complementary to the target nucleic acid (region A or first region) and the conjugate moiety (region C or third region).

[0203] Region B refers to biocleavable linkers comprising or consisting of a physiologically labile bond that is cleavable under conditions normally encountered or analogous to those encountered within a mammalian body. Conditions under which physiologically labile linkers undergo chemical transformation (e.g., cleavage) include chemical conditions such as pH, temperature, oxidative or reductive conditions or agents, and salt concentration found in or analogous to those encountered in mammalian cells. Mammalian intracellular conditions also include the presence of enzymatic activity normally present in a mammalian cell such as from proteolytic enzymes or hydrolytic enzymes or nucleases. In one embodiment the biocleavable linker is susceptible to S1 nuclease cleavage. In some embodiments the nuclease susceptible linker comprises between 1 and 5 nucleosides, such as DNA nucleoside(s) comprising at least two consecutive phosphodiester linkages. Phosphodiester containing biocleavable linkers are described in more detail in WO 2014/076195.

[0204] Region Y refers to linkers that are not necessarily biocleavable but primarily serve to covalently connect a conjugate moiety (region C or third region), to an oligonucleotide (region A or first region). The region Y linkers may comprise a chain structure or an oligomer of repeating units such as ethylene glycol, amino acid units or amino alkyl groups The antisense oligonucleotide progranulin agonist conjugates of the present invention can be constructed of the following regional elements A-C, A-B-C, A-B-Y-C, A-Y-B-C or A-Y-C. In some embodiments the linker (region Y) is an amino alkyl, such as a C2-C36 amino alkyl group, including, for example C6 to C12 amino alkyl groups. In some embodiments the linker (region Y) is a C6 amino alkyl group.

### Treatment

[0205] The term ‘treatment’ as used herein refers to both treatment of an existing disease (e.g. a disease or disorder as herein referred to), or prevention of a disease, i.e. prophylaxis. It will therefore be recognized that treatment as referred to herein may, in some embodiments, be prophylactic.

### DETAILED DESCRIPTION OF THE INVENTION

[0206] The inventors have identified that the expression level of the progranulin transcript can be effectively enhanced by targeting the progranulin precursor-mRNA (pre-mRNA) transcript or the progranulin mature mRNA sequence with antisense oligonucleotides, particularly antisense oligonucleotides which comprise high affinity sugar modified nucleosides, such as high affinity 2′ sugar modified nucleosides, such as LNA nucleosides or 2′-O-methoxyethyl (MOE) nucleosides.

[0207] Described herein are target sites present on the human progranulin nucleic acid target, such as a progranulin precursor-mRNA (pre-mRNA) or mature mRNA sequence, which can be targeted by antisense oligonucleotide agonists of progranulin.

[0208] The inventors have surprisingly determined that targeting the 5′ UTR and 3′ UTR of the progranulin mature mRNA can be particularly effective.

[0209] The 5′ UTR contains upstream start sites (AUG sites), also known as upstream open reading frames (uORFs). Without wishing to be bound by theory, it is considered that the antisense oligonucleotide progranulin agonists of the invention can increase progranulin production by binding to these regions and affecting, such as reducing, protein translation from these upstream AUG sites. This ensures that protein translation is initiated from the downstream canonical start site (ORF), increasing progranulin production.

[0210] The 3′ UTR contains binding sites for microRNAs. Without wishing to be bound by theory, it is considered that the antisense oligonucleotide progranulin agonists of the invention may regulate gene expression by binding to these sites in the 3′UTR and preventing microRNA-induced repression of gene expression, leading to increased progranulin production.

[0211] Oligonucleotides, such as RNaseH recruiting single stranded antisense oligonucleotides or siRNAs are used extensively in the art to inhibit target RNAs—i.e. are used as antagonists of their complementary nucleic acid target.

[0212] The antisense oligonucleotide of the present invention are agonists, i.e. enhance the expression of their complementary target, progranulin nucleic acids, and thereby enhance the expression of progranulin protein. Enhanced progranulin expression is desirable to treat a range of neurological disorders, such as TDP-43 pathologies, or disorders which are characterized by, or caused by progranulin haploinsufficiency.

[0213] In certain embodiments the antisense oligonucleotide progranulin agonists of the present invention may enhance the production of their complementary target, progranulin nucleic acids, by at least about 10%. In other embodiments the antisense oligonucleotide progranulin agonists of the present invention may enhance the production of their complementary target, progranulin nucleic acids, by at least about 15%, at least about 20%, at least about 25%, at least about 30%, at least about 35%, at least about 40%, at least about 45%, at least about 50% or more, at least about 60% or more, at least about 70% or more, at least about 80% or more, at least about 90% or more, at least about 100% or more, at least about 200% or more, at least about 300% or more, at least about 400% or more, or at least about 500% or more.

[0214] In some embodiments, the antisense oligonucleotide progranulin agonist of the invention or the contiguous nucleotide sequence thereof comprises or consists of 10, 11, 12, 13, 14, 15, 16, 17, 18, 19, 20, 21, 22, 23, 24, 25, 26, 27, 28, 29, 30, 31, 32, 33, 34, 35, 36, 37, 38, 39 or 40 contiguous nucleotides in length.

[0215] In some embodiments, the entire nucleotide sequence of the antisense oligonucleotide is the contiguous nucleotide sequence.

[0216] In some embodiments the contiguous nucleotide sequence is complementary to a 5′UTR region of a human progranulin mature mRNA transcript. The contiguous nucleotide sequence may be fully complementary to a 5′UTR region of a human progranulin mature mRNA transcript. As indicated above, and without wishing to be bound by theory, targeting the 5′UTR may increase progranulin expression by binding to upstream start sites (AUG sites) and affecting, such as reducing, protein translation from these upstream AUG sites. This ensures that protein translation is initiated from the downstream canonical start site (ORF), increasing progranulin production.

[0217] In some embodiments the contiguous nucleotide sequence may be complementary to SEQ ID NO 2, SEQ ID NO 689, SEQ ID NO 683, SEQ ID NO 684, SEQ ID NO 685, SEQ ID NO 686, SEQ ID NO 687, SEQ ID NO 688, or a sequence selected from the group consisting of SEQ ID NO 343-586.

[0218] In another embodiment the contiguous nucleotide sequence may be complementary to nucleotides 38-246 of SEQ ID NO 1.

[0219] In another embodiment the contiguous nucleotide sequence may be fully complementary to SEQ ID NO 2, or SEQ ID NO 689.

[0220] In another embodiment the contiguous nucleotide sequence may be fully complementary to a sequence selected from the group consisting of SEQ ID NO 568, SEQ ID NO 571, SEQ ID NO 575, SEQ ID NO 576, SEQ ID NO 577, SEQ ID NO 578, SEQ ID NO 584 & SEQ ID NO 586.

[0221] In one embodiment the contiguous nucleotide sequence may a sequence selected from the group consisting of SEQ ID NO 3-342. The invention also contemplates fragments of these contiguous nucleotide sequences, including fragments of at least 8, at least 9, at least 10, at least 11, at least 12, at least 13, at least 14, at least 15, at least 16 or at least 17 contiguous nucleotides thereof.

[0222] In certain embodiments the contiguous nucleotide sequence may be selected from the group consisting of SEQ ID NO 105, SEQ ID NO 106, SEQ ID NO 110, SEQ ID NO 113, SEQ ID NO 114, SEQ ID NO 231 and SEQ ID NO 241. The invention also contemplates fragments of these contiguous nucleotide sequences, including fragments of at least 8, at least 9, at least 10, at least 11, at least 12, at least 13, at least 14, at least 15, at least 16 or at least 17 contiguous nucleotides thereof.

[0223] In some embodiments the contiguous nucleotide sequence is complementary to a 3′UTR region of a human progranulin mature mRNA transcript. The contiguous nucleotide sequence may be fully complementary to a 3′UTR region of a human progranulin mature mRNA transcript. As indicated above, and without wishing to be bound by theory, the antisense oligonucleotide progranulin agonists of the invention may regulate gene expression by binding to microRNA sites in the 3′UTR and preventing microRNA-induced repression of gene expression, leading to increased progranulin production.

[0224] In some embodiments the contiguous nucleotide sequence may be complementary to SEQ ID NO 684, SEQ ID NO 685, SEQ ID NO 686, SEQ ID NO 687, SEQ ID NO 688, or a sequence selected from the group consisting of SEQ ID NO 587-682. In another embodiment the contiguous nucleotide sequence may be complementary to nucleotides 2039-2346 of SEQ ID NO 1.

[0225] In another embodiment the contiguous nucleotide sequence may be fully complementary to SEQ ID NO 684, SEQ ID NO 685, SEQ ID NO 686, SEQ ID NO 687, and SEQ ID NO 688.

[0226] In another embodiment the contiguous nucleotide sequence may be fully complementary to a sequence selected from the group consisting of SEQ ID NOs 607, SEQ ID NO 608, SEQ ID NO 609, SEQ ID NO 610, SEQ ID NO 611, SEQ ID NO 612, SEQ ID NO 619, SEQ ID NO 620, SEQ ID NO 633, SEQ ID NO 640, SEQ ID NO 641, SEQ ID NO 645, SEQ ID NO 651, and SEQ ID NO 652.

[0227] In some embodiments, the antisense oligonucleotide progranulin agonist or contiguous nucleotide sequence comprises or consists of a sequence selected from the group consisting of sequences SEQ ID NO 3-342. It will be understood that the sequences shown in SEQ ID NO 3-342 may include modified nucleobases which function as the shown nucleobase in base pairing, for example 5-methyl cytosine may be used in place of methyl cytosine. Inosine may be used as a universal base.

[0228] In some embodiments, the antisense oligonucleotide progranulin agonist or contiguous nucleotide sequence comprises or consists of 8 to 30 or 8 to 40 nucleotides in length with at least 90% identity, preferably 100% identity, to a sequence selected from the group consisting of SEQ ID NO: 3 to 342. In some embodiments the antisense oligonucleotide progranulin agonist may be 8, 9, 10, 11, 12, 13, 14, 15, 16, 17, 18, 19, 20, 21, 22, 23, 24, 25, 26, 27, 28, 29, 30, 31, 32, 33, 34, 35, 36, 37, 38, 39 or 40 nucleotides in length.

[0229] Without wishing to be bound by theory, it is considered that the antisense oligonucleotide progranulin agonists of the invention which bind to target sites outside the 5′ UTR and 3′ UTR regions of the progranulin mature mRNA may increase progranulin protein expression. This increased progranulin protein expression may occur as a result of effects of the antisense oligonucleotide progranulin agonists on secondary regulatory mRNA structures and/or on binding of RNA binding proteins that would otherwise negatively affect protein translation or progranulin mRNA stability.

[0230] It is understood that the contiguous nucleobase sequences (motif sequence) can be modified to for example increase nuclease resistance and/or binding affinity to the target nucleic acid.

[0231] The pattern in which the modified nucleosides (such as high affinity modified nucleosides) are incorporated into the oligonucleotide sequence is generally termed oligonucleotide design.

[0232] The antisense oligonucleotide progranulin agonists of the invention are designed with modified nucleosides and DNA nucleosides. Advantageously, high affinity modified nucleosides are used.

[0233] In an embodiment, the oligonucleotide comprises at least 1 modified nucleoside, such as at least 2, at least 3, at least 4, at least 5, at least 6, at least 7, at least 8, at least 9, at least 10, at least 11, at least 12, at least 13, at least 14, at least 15 or at least 16 modified nucleosides.

[0234] In an embodiment the oligonucleotide comprises from 1 to 10 modified nucleosides, such as from 2 to 9 modified nucleosides, such as from 3 to 8 modified nucleosides, such as from 4 to 7 modified nucleosides, such as 6 or 7 modified nucleosides. Suitable modifications are described in the “Definitions” section under “modified nucleoside”, “high affinity modified nucleosides”, “sugar modifications”, “2′ sugar modifications” and Locked nucleic acids (LNA)”.

[0235] In an embodiment, the antisense oligonucleotide progranulin agonist comprises one or more sugar modified nucleosides, such as 2′ sugar modified nucleosides. Preferably the antisense oligonucleotide progranulin agonist of the invention comprises one or more 2′ sugar modified nucleoside independently selected from the group consisting of 2′-O-alkyl-RNA, 2′-O-methyl-RNA (2′oMe), 2′-alkoxy-RNA, 2′-O-methoxyethyl-RNA (2′MOE), 2′-amino-DNA, 2′-fluoro-DNA, arabino nucleic acid (ANA). 2′-fluoro-ANA and LNA nucleosides. It is advantageous if one or more of the modified nucleoside(s) is a locked nucleic acid (LNA).

[0236] In a further embodiment the antisense oligonucleotide progranulin agonist comprises at least one modified internucleoside linkage. Suitable internucleoside modifications are described in the “Definitions” section under “Modified internucleoside linkage”. It is advantageous if at least 75%, such as all, the internucleoside linkages within the contiguous nucleotide sequence are phosphorothioate or boranophosphate internucleoside linkages. In some embodiments all the internucleotide linkages in the contiguous sequence of the oligonucleotide are phosphorothioate linkages.

[0237] An antisense oligonucleotide progranulin agonist may have the structure:

[chemical structure]

[0238] The invention also includes an antisense oligonucleotide progranulin agonist wherein the oligonucleotide is the oligonucleotide compound TgGccAggGatCagGG (SEQ ID NO: 106) wherein capital letters represent beta-D-oxy LNA nucleosides, lowercase letters represent DNA nucleosides, all LNA C are 5-methyl cytosine, and all internucleoside linkages are phosphorothioate internucleoside linkages.

### Numbered Paragraphs of the Invention

[0239] Aspects of the present invention will now be described by way of numbered paragraphs.

[0240] 1. An antisense oligonucleotide progranulin agonist, wherein the antisense oligonucleotide is 8-40 nucleotides in length and comprises a contiguous nucleotide sequence of 8-40 nucleotides in length which are fully complementary to a human progranulin pre-mRNA or mRNA transcript, such as SEQ ID NO 1.

[0241] 2. The antisense oligonucleotide according to paragraph 1, wherein the contiguous nucleotide sequence is of a length of at least 12 nucleotides in length, such as 12-16 or 12-18 nucleotides in length.

[0242] 3. The antisense oligonucleotide according to paragraph 1 or 2, wherein the contiguous nucleotide sequence is the same length as the antisense oligonucleotide.

[0243] 4. The antisense oligonucleotide according to any one of paragraphs 1-3, wherein contiguous nucleotide sequence is fully complementary to SEQ ID NO 2, SEQ ID NO 689, SEQ ID NO 683, SEQ ID NO 684, SEQ ID NO 685, SEQ ID NO 686, SEQ ID NO 687, SEQ ID NO 688, or a sequence selected from the group consisting of SEQ ID NO 343-682.

[0244] 5. The antisense oligonucleotide according to any one of paragraphs 1-4, wherein contiguous nucleotide sequence is fully complementary to a 5′UTR region of a human progranulin mRNA transcript.

[0245] 6. The antisense oligonucleotide according to any one of paragraphs 1-5, wherein contiguous nucleotide sequence is fully complementary to nucleotides 38-246 of SEQ ID NO 1.

[0246] 7. The antisense oligonucleotide according to any one of paragraphs 1-6, wherein contiguous nucleotide sequence is fully complementary to SEQ ID NO 2, or SEQ ID NO 689.

[0247] 8. The antisense oligonucleotide according to any one of paragraphs 1-7, wherein the contiguous nucleotide sequence is fully complementary to a sequence selected from the group consisting of SEQ ID NO 568, 571, 575, 576, 577, 578, 584 & 586.

[0248] 9. The antisense oligonucleotide according to any one of paragraphs 1-4, wherein contiguous nucleotide sequence is fully complementary to a 3′UTR region of a human progranulin mRNA transcript.

[0249] 10. The antisense oligonucleotide according to any one of paragraphs 1-4 or 9, wherein contiguous nucleotide sequence is fully complementary to nucleotides 2039-2346 of SEQ ID NO 1.

[0250] 11. The antisense oligonucleotide according to any one of paragraphs 1-4, 9 or 10 wherein contiguous nucleotide sequence is fully complementary to a sequence selected from the group consisting of SEQ ID NO 684, 685, 683, 686, 687, and 688.

[0251] 12. The antisense oligonucleotide according to any one of paragraphs 1-4, 9, 10, or 11 wherein contiguous nucleotide sequence is fully complementary to a sequence selected from the group consisting of SEQ ID NOs 607, 608, 609, 610, 611, 612, 619, 620, 633, 640, 641, 645, 651, and 652.

[0252] 13. The antisense oligonucleotide according to any one of paragraphs 1-12, wherein contiguous nucleotide sequence is a sequence selected from the group consisting of SEQ ID NO 3-342, or at least 8 or at least 10 contiguous nucleotides thereof.

[0253] 14. The antisense oligonucleotide according to any one of paragraphs 1-13, wherein the oligonucleotide is or comprises an antisense oligonucleotide mixmer or totalmer.

[0254] 15. The antisense oligonucleotide of any one of paragraphs 1-14, wherein the antisense oligonucleotide or contiguous nucleotide sequence thereof is 10-20 nucleotides in length.

[0255] 16. The antisense oligonucleotide according to paragraph 1, wherein the antisense oligonucleotide is selected from the group consisting of COMP ID NOs 3-342.

[0256] 17. A conjugate comprising the antisense oligonucleotide according to any one of paragraphs 1-16, and at least one conjugate moiety covalently attached to said oligonucleotide.

[0257] 18. A pharmaceutically acceptable salt of the antisense oligonucleotide according to any one of paragraphs 1-16, or the conjugate according to paragraph 17.

[0258] 19. The pharmaceutically acceptable salt of paragraph 18, wherein the salt is a sodium salt or a potassium salt.

[0259] 20. A pharmaceutical composition comprising the antisense oligonucleotide of paragraph 1-16 or the conjugate of paragraph 17 and a pharmaceutically acceptable diluent, solvent, carrier, salt and/or adjuvant.

[0260] 21. A pharmaceutical composition according to paragraph 20, wherein the pharmaceutical composition comprises the antisense oligonucleotide of paragraph 1-16 or the conjugate of paragraph 17, or the pharmaceutically acceptable salt of paragraph 18 or 19 and an aqueous diluent or solvent, such as phosphate buffered saline.

[0261] 22. An in vivo or in vitro method for enhancing the expression of progranulin in a cell which is expressing progranulin, said method comprising administering an antisense oligonucleotide of any one of paragraphs 1-16 or the conjugate according to paragraph 17, or the salt according to paragraph 18 or 19, or the pharmaceutical composition according to paragraph 20 or 21 in an effective amount to said cell.

[0262] 23. The method according to paragraph 22, wherein the cell is either a human cell or a mammalian cell.

[0263] 24. A method for treating or preventing neurological disease comprising administering a therapeutically or prophylactically effective amount of an antisense oligonucleotide of any one of paragraphs 1-16 or the conjugate according to paragraph 17, or the salt according to paragraph 18 or 19, or the pharmaceutical composition according to paragraph 20 or 21 to a subject suffering from or susceptible to neurological disease.

[0264] 25. The antisense oligonucleotide of any one of paragraphs 1-16 or the conjugate according to paragraph 17, or the salt according to paragraph 18 or 19, or the pharmaceutical composition according to paragraph 20 or 21 for use as a medicament.

[0265] 26. The an antisense oligonucleotide of any one of paragraphs 1-16 or the conjugate according to paragraph 17, or the salt according to paragraph 18 or 19, or the pharmaceutical composition according to paragraph 20 or 21 for use in the treatment of a neurological disease, such as a TDP-43 pathology.

[0266] 27. The an antisense oligonucleotide of any one of paragraphs 1-16 or the conjugate according to paragraph 17, or the salt according to paragraph 18 or 19, or the pharmaceutical composition according to paragraph 20 or 21 for use in the treatment of progranulin haploinsufficiency.

[0267] 28. Use of the antisense oligonucleotide of paragraph 1-16 or the conjugate according to paragraph 17, or the salt according to paragraph 18 or 19, or the pharmaceutical composition according to paragraph 20 or 21 for the preparation of a medicament for treatment or prevention of a neurological disease, such as a TDP-43 pathology.

[0268] 29. Use of the antisense oligonucleotide of paragraph 1-16 or the conjugate according to paragraph 17, or the salt according to paragraph 18 or 19, or the pharmaceutical composition according to paragraph 20 or 21, for the preparation of a medicament for treatment of progranulin haploinsufficiency.

[0269] 30. The method or use according to any one of paragraphs 22-29, wherein the method or use is for the treatment of fronto temporal dementia (FTD), neuropathologic frontotemporal lobar degeneration or neuroinflammation.

### NUMBERED EMBODIMENTS OF THE INVENTION

[0270] Numbered embodiments of the present invention will now be described.

[0271] 1. An antisense oligonucleotide progranulin agonist, wherein the antisense oligonucleotide is 8-40 nucleotides in length and comprises a contiguous nucleotide sequence of 8-40 nucleotides in length which are complementary to a human progranulin pre-mRNA or mRNA transcript.

[0272] 2. The antisense oligonucleotide progranulin agonist according to embodiment 1, wherein the contiguous nucleotide sequence is of a length of at least 12 nucleotides in length.

[0273] 3. The antisense oligonucleotide progranulin agonist according to embodiment 1 or embodiment 2, wherein the contiguous nucleotide sequence is the same length as the antisense oligonucleotide.

[0274] 4. The antisense oligonucleotide progranulin agonist according to any one of embodiments 1-3, wherein the contiguous nucleotide sequence is complementary to a 5′UTR region of a human progranulin mRNA transcript.

[0275] 5. The antisense oligonucleotide progranulin agonist according to embodiment 4, wherein the contiguous nucleotide sequence is complementary to SEQ ID NO 2, SEQ ID NO 689, SEQ ID NO 683, or a sequence selected from the group consisting of SEQ ID NO 343-586.

[0276] 6. The antisense oligonucleotide progranulin agonist according to any one of embodiments 1-5, wherein the contiguous nucleotide sequence is selected from SEQ ID NO 105, SEQ ID NO 106, SEQ ID NO 110, SEQ ID NO 113, SEQ ID NO 114, SEQ ID NO 231 and SEQ ID NO 241 or at least 8 or at least 10 contiguous nucleotides thereof.

[0277] 7. The antisense oligonucleotide progranulin agonist according to any one of embodiments 1-3, wherein contiguous nucleotide sequence is complementary to a 3′UTR region of a human progranulin mRNA transcript.

[0278] 8. The antisense oligonucleotide progranulin agonist according to embodiment 7, wherein the contiguous nucleotide sequence is complementary to SEQ ID NO 684, SEQ ID NO 685, SEQ ID NO 686, SEQ ID NO 687, SEQ ID NO 688, or a sequence selected from the group consisting of SEQ ID NO 587-682.

[0279] 9. The antisense oligonucleotide progranulin agonist according to any one of embodiments 1-8, wherein the antisense oligonucleotide progranulin agonist is or comprises an antisense oligonucleotide mixmer or totalmer.

[0280] 10. An antisense oligonucleotide progranulin agonist having the structure:

[chemical structure]

[0281] 11. An antisense oligonucleotide progranulin agonist wherein the oligonucleotide is the oligonucleotide compound TgGccAggGatCagGG (SEQ ID NO: 106) wherein capital letters represent beta-D-oxy LNA nucleosides, lowercase letters represent DNA nucleosides, all LNA C are 5-methyl cytosine, and all internucleoside linkages are phosphorothioate internucleoside linkages.

[0282] 12. An in vivo or in vitro method for enhancing the expression of progranulin in a cell which is expressing progranulin, said method comprising administering an antisense oligonucleotide progranulin agonist according to any one of embodiments 1-11 in an effective amount to said cell.

[0283] 13. The antisense oligonucleotide progranulin agonist according to any one of embodiments 1-11, for use in the treatment of a neurological disease.

[0284] 14. The antisense oligonucleotide progranulin agonist or pharmaceutical composition for use in the treatment of a neurological disease according to embodiment 13, wherein the neurological disease is a TDP-43 pathology.

[0285] 15. The antisense oligonucleotide progranulin agonist according to any one of embodiments 1-11 for use in the treatment of progranulin haploinsufficiency.

### EXAMPLES

### Example 1

### GRN 5′ UTR Luciferase Reporter Constructs

[0286] The GRN 5′ UTR sequence (SEQ ID #690) was cloned into the psiCHECK2 plasmid (Promega) immediately in front of the renilla luciferase ATG site using the Q5 site-directed mutagenesis kit (New England Biolabs) according to manufacturer's instruction.

[0287] 5′ UTR sequence from nucleotide number 38 to 256 according to Homo sapiens granulin precursor (GRN), RefSeq NM_002087.3 (SEQ ID NO 1):

SEQ ID#690
GGCGAGAGGAAGCAGGGAGGAGAGTGATTTGAGTAGAAAAGAAACACAGC
ATTCCAGGCTGGCCCCACCTCTATATTGATAAGTAGCCAATGGGAGCGGG
TAGCCCTGATCCCTGGCCAATGGAAACTGAGGTAGGCGGGTCATCGCGCT
GGGGTCTGTAGTCTGAGCGCTACCCGGTTGCTGCTGCCCAAGGACCGCGG
AGTCGGACGCAGGCAGACC

[0288] For the site-directed mutagenesis and insertion of the GRN 5′ UTR the following primers were used:

Forward primer
SEQ ID NO 691
5′-ATGGAAACTGAGGTAGGCGGGTCATCGCGCTGGGGTCTGTAGTCTGA
GCGCTACCCGGTTGCTGCTGCCCAAGGACCGCGGAGTCGGACGCAGGCAG
ACCATGGCTTCCAAGGTGTACGACCCCGAGC-3′
and
reverse primer
SEQ ID NO 692
5′-TGGCCAGGGATCAGGGCTACCCGCTCCCATTGGCTACTTATCAATAT
AGAGGTGGGGCCAGCCTGGAATGCTGTGTTTCTTTTCTACTCAAATCACT
CTCCTCCCTGCTTCCTCTCGCCGGCTAGCCTATAGTGAGTCGTATTAAGT
AC

[0289] After transformation of chemical competent bacteria (One Shot TOP10 Chemically Competent E. coli, Thermofisher) and overnight growth on LB agar plates containing ampicillin (imMedia Growth Medium, agar, ampicillin, Thermofisher), single colonies were selected and further grown overnight with constant shaking at 37 Degrees Celcius in LB broth medium containing ampicillin (50 μg/mL) (Thermofisher). Final mini- and midi-prep plasmid purifications were done according to vendors instruction (Qiagen). The inserted 5′ UTR GRN sequences were verified using Sanger sequencing (Eurofins Genomics, Ebersberg, Germany).

### Example 2

### GRN 3′ UTR Luciferase Reporter Constructs

[0290] The GRN 3′ UTR (SEQ ID #2) was cloned into the psiCHECK2 plasmid (Promega) after the renilla luciferase coding sequence using the psiCHECK2 multiple cloning site and the XhoI and NotI restriction sites.

[0291] 3′ UTR sequence from nucleotide number 2039 to 2346 according to Homo sapiens granulin precursor (GRN), RefSeq NM_002087.3 (SEQ ID NO 1).

SEQ ID#2:
GGGACAGTACTGAAGACTCTGCAGCCCTCGGGACCCCACTCGGAGGGTGC
CCTCTGCTCAGGCCTCCCTAGACCTCCCCCTAACCAAATTCTCCCTGGAC
CCCATTCTGAGCTCCCCATCACCATGGGAGGTGGGGCCTCAATCTAAGGC
CTTCCCTGTCAGAAGGGGGTTGTGGCAAAAGCCACATTACAAGCTGCCAT
CCCCTCCCCGTTTCAGTGGACCCTGTGGCCAGGTGCTTTTCCCTATCCAC
AGGGGTGTTTGTGTGTGTGCGCGTGTGCGTTTCAATAAAGTTTGTACACT
TTCTTAA

[0292] Double stranded DNA fragment (gBlock, Integrated DNA technologies) containing the GRN 3′ UTR (SEQ ID #2) flanked by XhoI and NotI sites was cut by XhoI and NotI enzymes (New England Biolabs) according to vendors protocol and ligated using T4 Ligase (New England Biolabs) into the previously XhoI/NotI cut psiCHECK2 plasmid.

[0293] After transformation of chemical competent bacteria (One Shot® TOP10 Chemically Competent E. coli, Thermofisher) and overnight growth on LB agar plates containing ampicillin (imMedia Growth Medium, agar, ampicillin, Thermofisher), single colonies were selected and further grown overnight with constant shaking at 37 Degrees Celcius in LB broth medium containing ampicillin (50 μg/mL) (Thermofisher). Final mini- and midiprep plasmid purifications were done according to vendors instruction (Qiagen). The inserted 3′ UTR GRN sequence was verified using Sanger sequencing (Eurofins Genomics, Ebersberg, Germany).

### Example 3 Luciferase Reporter Assays

[0294] The day before transfection, 15000 HeLa cells per well were seeded in 96-well plates (Nunc™ F96 MicroWell™ White Polystyrene Plates) in 100 μL full growth medium. The day at transfection, media is removed and the transfection mixture consisting of 80 μL Opti-MEM Reduced Serum Medium (ThermoFisher Scientific). 6.25 μg/mL Lipofectamine 2000 (ThermoFisher Scientific) and 100 ng psiCHECK2 plasmid with 5′ UTR/3′UTR of GRN is added to each well according to manufacturer's instructions (ThermoFisher Scientific) Shortly after, 20 μL of Opti-MEM Reduced Serum Medium with 500 nM of each antisense oligonucleotide is added to each well for a final concentration of 100 nM. Wells with seeded cells not exposed to transfection reagents are included to correct for background luciferase activity. After 6 hours incubation, transfection mixture is removed from all wells and replaced with full growth medium. The following day, media is removed and replaced with 75 μL PBS, and the Firefly luciferase activity is measured using the Dual-GLo luciferase system (Promega) according to vendors protocol and the EnSight Multimode Plate Reader (Perkin Elmer). Measurement of The firefly luciferase activity is followed by measurement of the renilla luciferase activity. After correction of the background luciferase activity for each well, the relative luciferase activity is calculated by dividing the Renilla luciferase activity by the firefly luciferase activity for each well to correct for transfection efficiency. Finally, for each antisense oligonucleotides the relative luciferase activity is normalized to PBS transfected cells (PBS=1) and values>1 reflects that the respective antisense oligonucleotides have increased the activity/expression of the renilla luciferase activity.

### Example 4

[0295] Antisense oligonucleotides were designed for the 5′ UTR from position 38 to 241 according to RefSeq NM_002087.3 (SEQ ID NO 1) with one nucleotide basepair shift as shown in table 1, which also provides the data from the luciferase assay, were a value of greater than 1 indicates an increased expression of progranulin (i.e. progranulin agonist activity of the antisense oligonucleotide), and a value lower than 1 indicates a decreased expression of progranulin (i.e. an inhibition or antagonistic effect, on progranulin expression).

TABLE 1
All the antisense oligonucleotides are designed as 16-mers DNA-LNA mixmers with
a phosphorothioate backbone. LNA at the very 5′ and 3′ position
and e.g. LNA for every 2^{nd} or 3^{rd} nucleotide (see Compound table).

| | | | RefSeq | | | | Relative |
|---|---|---|---|---|---|---|---|
| | Compound | Oligonucleotide | NM_002087.3 | | Target | | luciferase |
| | ID (See | Sequence Motif | (SEQ ID NO 1) | | Site | | activity |
| | Compound | (nucleobase | Start | End | Sequence | Target | (Relative |
| SEQ ID | Table) | Sequence) | Position | Position | ID | Site Sequence | to PBS) |
| SEQ ID 3 | COMP ID 3 | CCTGCTTCCTCTCGCC | 38 | 53 | SEQ ID 343 | GGCGAGAGGAAGCAGG | 0.47 |
| SEQ ID 4 | COMP ID 4 | CCCTGCTTCCTCTCGC | 39 | 54 | SEQ ID 344 | GCGAGAGGAAGCAGGG | 0.60 |
| SEQ ID 5 | COMP ID 5 | TCCCTGCTTCCTCTCG | 40 | 55 | SEQ ID 345 | CGAGAGGAAGCAGGGA | 0.62 |
| SEQ ID 6 | COMP ID 6 | CTCCCTGCTTCCTCTC | 41 | 56 | SEQ ID 346 | GAGAGGAAGCAGGGAG | 0.65 |
| SEQ ID 7 | COMP ID 7 | CCTCCCTGCTTCCTCT | 42 | 57 | SEQ ID 347 | AGAGGAAGCAGGGAGG | 0.85 |
| SEQ ID 8 | COMP ID 8 | TCCTCCCTGCTTCCTC | 43 | 58 | SEQ ID 348 | GAGGAAGCAGGGAGGA | 0.81 |
| SEQ ID 9 | COMP ID 9 | CTCCTCCCTGCTTCCT | 44 | 59 | SEQ ID 349 | AGGAAGCAGGGAGGAG | 0.53 |
| SEQ ID 10 | COMP ID 10 | TCTCCTCCCTGCTTCC | 45 | 60 | SEQ ID 350 | GGAAGCAGGGAGGAGA | 0.80 |
| SEQ ID 11 | COMP ID 11 | CTCTCCTCCCTGCTTC | 46 | 61 | SEQ ID 351 | GAAGCAGGGAGGAGAG | 0.78 |
| SEQ ID 12 | COMP ID 12 | ACTCTCCTCCCTGCTT | 47 | 62 | SEQ ID 352 | AAGCAGGGAGGAGAGT | 0.78 |
| SEQ ID 13 | COMP ID 13 | CACTCTCCTCCCTGCT | 48 | 63 | SEQ ID 353 | AGCAGGGAGGAGAGTG | 0.53 |
| SEQ ID 14 | COMP ID 14 | TCACTCTCCTCCCTGC | 49 | 64 | SEQ ID 354 | GCAGGGAGGAGAGTGA | 0.66 |
| SEQ ID 15 | COMP ID 15 | ATCACTCTCCTCCCTG | 50 | 65 | SEQ ID 355 | CAGGGAGGAGAGTGAT | n.d. |
| SEQ ID 16 | COMP ID 16 | AATCACTCTCCTCCCT | 51 | 66 | SEQ ID 356 | AGGGAGGAGAGTGATT | n.d. |
| SEQ ID 17 | COMP ID 17 | AAATCACTCTCCTCCC | 52 | 67 | SEQ ID 357 | GGGAGGAGAGTGATTT | n.d. |
| SEQ ID 18 | COMP ID 18 | CAAATCACTCTCCTCC | 53 | 68 | SEQ ID 358 | GGAGGAGAGTGATTTG | n.d. |
| SEQ ID 19 | COMP ID 19 | TCAAATCACTCTCCTC | 54 | 69 | SEQ ID 359 | GAGGAGAGTGATTTGA | 0.56 |
| SEQ ID 20 | COMP ID 20 | CTCAAATCACTCTCCT | 55 | 70 | SEQ ID 360 | AGGAGAGTGATTTGAG | 0.58 |
| SEQ ID 21 | COMP ID 21 | ACTCAAATCACTCTCC | 56 | 71 | SEQ ID 361 | GGAGAGTGATTTGAGT | 0.50 |
| SEQ ID 22 | COMP ID 22 | TACTCAAATCACTCTC | 57 | 72 | SEQ ID 362 | GAGAGTGATTTGAGTA | 0.44 |
| SEQ ID 23 | COMP ID 23 | CTACTCAAATCACTCT | 58 | 73 | SEQ ID 363 | AGAGTGATTTGAGTAG | 0.61 |
| SEQ ID 24 | COMP ID 24 | TCTACTCAAATCACTC | 59 | 74 | SEQ ID 364 | GAGTGATTTGAGTAGA | 0.44 |
| SEQ ID 25 | COMP ID 25 | TTCTACTCAAATCACT | 60 | 75 | SEQ ID 365 | AGTGATTTGAGTAGAA | 0.47 |
| SEQ ID 26 | COMP ID 26 | TTTCTACTCAAATCAC | 61 | 76 | SEQ ID 366 | GTGATTTGAGTAGAAA | 0.57 |
| SEQ ID 27 | COMP ID 27 | TTTTCTACTCAAATCA | 62 | 77 | SEQ ID 367 | TGATTTGAGTAGAAAA | 0.49 |
| SEQ ID 28 | COMP ID 28 | CTTTTCTACTCAAATC | 63 | 78 | SEQ ID 368 | GATTTGAGTAGAAAAG | 0.54 |
| SEQ ID 29 | COMP ID 29 | TCTTTTCTACTCAAAT | 64 | 79 | SEQ ID 369 | ATTTGAGTAGAAAAGA | 0.49 |
| SEQ ID 30 | COMP ID 30 | TTCTTTTCTACTCAAA | 65 | 80 | SEQ ID 370 | TTTGAGTAGAAAAGAA | 0.38 |
| SEQ ID 31 | COMP ID 31 | TTTCTTTTCTACTCAA | 66 | 81 | SEQ ID 371 | TTGAGTAGAAAAGAAA | 0.59 |
| SEQ ID 32 | COMP ID 32 | GTTTCTTTTCTACTCA | 67 | 82 | SEQ ID 372 | TGAGTAGAAAAGAAAC | 0.44 |
| SEQ ID 33 | COMP ID 33 | TGTTTCTTTTCTACTC | 68 | 83 | SEQ ID 373 | GAGTAGAAAAGAAACA | 0.61 |
| SEQ ID 34 | COMP ID 34 | GTGTTTCTTTTCTACT | 69 | 84 | SEQ ID 374 | AGTAGAAAAGAAACAC | 0.56 |
| SEQ ID 35 | COMP ID 35 | TGTGTTTCTTTTCTAC | 70 | 85 | SEQ ID 375 | GTAGAAAAGAAACACA | 0.47 |
| SEQ ID 36 | COMP ID 36 | CTGTGTTTCTTTTCTA | 71 | 86 | SEQ ID 376 | TAGAAAAGAAACACAG | 0.36 |
| SEQ ID 37 | COMP ID 37 | GCTGTGTTTCTTTTCT | 72 | 87 | SEQ ID 377 | AGAAAAGAAACACAGC | 0.45 |
| SEQ ID 38 | COMP ID 38 | TGCTGTGTTTCTTTTC | 73 | 88 | SEQ ID 378 | GAAAAGAAACACAGCA | 0.58 |
| SEQ ID 39 | COMP ID 39 | ATGCTGTGTTTCTTTT | 74 | 89 | SEQ ID 379 | AAAAGAAACACAGCAT | 0.77 |
| SEQ ID 40 | COMP ID 40 | AATGCTGTGTTTCTTT | 75 | 90 | SEQ ID 380 | AAAGAAACACAGCATT | 0.53 |
| SEQ ID 41 | COMP ID 41 | GAATGCTGTGTTTCTT | 76 | 91 | SEQ ID 381 | AAGAAACACAGCATTC | 0.73 |
| SEQ ID 42 | COMP ID 42 | GGAATGCTGTGTTTCT | 77 | 92 | SEQ ID 382 | AGAAACACAGCATTCC | 0.77 |
| SEQ ID 43 | COMP ID 43 | TGGAATGCTGTGTTTC | 78 | 93 | SEQ ID 383 | GAAACACAGCATTCCA | 0.69 |
| SEQ ID 44 | COMP ID 44 | CTGGAATGCTGTGTTT | 79 | 94 | SEQ ID 384 | AAACACAGCATTCCAG | 0.63 |
| SEQ ID 45 | COMP ID 45 | CCTGGAATGCTGTGTT | 80 | 95 | SEQ ID 385 | AACACAGCATTCCAGG | 0.58 |
| SEQ ID 46 | COMP ID 46 | GCCTGGAATGCTGTGT | 81 | 96 | SEQ ID 386 | ACACAGCATTCCAGGC | 0.57 |
| SEQ ID 47 | COMP ID 47 | AGCCTGGAATGCTGTG | 82 | 97 | SEQ ID 387 | CACAGCATTCCAGGCT | 0.48 |
| SEQ ID 48 | COMP ID 48 | CAGCCTGGAATGCTGT | 83 | 98 | SEQ ID 388 | ACAGCATTCCAGGCTG | 0.62 |
| SEQ ID 49 | COMP ID 49 | CCAGCCTGGAATGCTG | 84 | 99 | SEQ ID 389 | CAGCATTCCAGGCTGG | 0.40 |
| SEQ ID 50 | COMP ID 50 | GCCAGCCTGGAATGCT | 85 | 100 | SEQ ID 390 | AGCATTCCAGGCTGGC | 0.32 |
| SEQ ID 51 | COMP ID 51 | GGCCAGCCTGGAATGC | 86 | 101 | SEQ ID 391 | GCATTCCAGGCTGGCC | 0.24 |
| SEQ ID 52 | COMP ID 52 | GGGCCAGCCTGGAATG | 87 | 102 | SEQ ID 392 | CATTCCAGGCTGGCCC | 0.15 |
| SEQ ID 53 | COMP ID 53 | GGGGCCAGCCTGGAAT | 88 | 103 | SEQ ID 393 | ATTCCAGGCTGGCCCC | 0.20 |
| SEQ ID 54 | COMP ID 54 | TGGGGCCAGCCTGGAA | 89 | 104 | SEQ ID 394 | TTCCAGGCTGGCCCCA | 0.62 |
| SEQ ID 55 | COMP ID 55 | GTGGGGCCAGCCTGGA | 90 | 105 | SEQ ID 395 | TCCAGGCTGGCCCCAC | 0.54 |
| SEQ ID 56 | COMP ID 56 | GGTGGGGCCAGCCTGG | 91 | 106 | SEQ ID 396 | CCAGGCTGGCCCCACC | 0.62 |
| SEQ ID 57 | COMP ID 57 | AGGTGGGGCCAGCCTG | 92 | 107 | SEQ ID 397 | CAGGCTGGCCCCACCT | 0.38 |
| SEQ ID 58 | COMP ID 58 | GAGGTGGGGCCAGCCT | 93 | 108 | SEQ ID 398 | AGGCTGGCCCCACCTC | 0.46 |
| SEQ ID 59 | COMP ID 59 | AGAGGTGGGGCCAGCC | 94 | 109 | SEQ ID 399 | GGCTGGCCCCACCTCT | 0.32 |
| SEQ ID 60 | COMP ID 60 | TAGAGGTGGGGCCAGC | 95 | 110 | SEQ ID 400 | GCTGGCCCCACCTCTA | 0.53 |
| SEQ ID 61 | COMP ID 61 | ATAGAGGTGGGGCCAG | 96 | 111 | SEQ ID 401 | CTGGCCCCACCTCTAT | 0.37 |
| SEQ ID 62 | COMP ID 62 | TATAGAGGTGGGGCCA | 97 | 112 | SEQ ID 402 | TGGCCCCACCTCTATA | 0.68 |
| SEQ ID 63 | COMP ID 63 | ATATAGAGGTGGGGCC | 98 | 113 | SEQ ID 403 | GGCCCCACCTCTATAT | 0.65 |
| SEQ ID 64 | COMP ID 64 | AATATAGAGGTGGGGC | 99 | 114 | SEQ ID 404 | GCCCCACCTCTATATT | 0.61 |
| SEQ ID 65 | COMP ID 65 | CAATATAGAGGTGGGG | 100 | 115 | SEQ ID 405 | CCCCACCTCTATATTG | 0.79 |
| SEQ ID 66 | COMP ID 66 | TCAATATAGAGGTGGG | 101 | 116 | SEQ ID 406 | CCCACCTCTATATTGA | 0.86 |
| SEQ ID 67 | COMP ID 67 | ATCAATATAGAGGTGG | 102 | 117 | SEQ ID 407 | CCACCTCTATATTGAT | 0.80 |
| SEQ ID 68 | COMP ID 68 | TATCAATATAGAGGTG | 103 | 118 | SEQ ID 408 | CACCTCTATATTGATA | 0.65 |
| SEQ ID 69 | COMP ID 69 | TTATCAATATAGAGGT | 104 | 119 | SEQ ID 409 | ACCTCTATATTGATAA | 0.49 |
| SEQ ID 70 | COMP ID 70 | CTTATCAATATAGAGG | 105 | 120 | SEQ ID 410 | CCTCTATATTGATAAG | 0.93 |
| SEQ ID 71 | COMP ID 71 | ACTTATCAATATAGAG | 106 | 121 | SEQ ID 411 | CTCTATATTGATAAGT | 0.73 |
| SEQ ID 72 | COMP ID 72 | TACTTATCAATATAGA | 107 | 122 | SEQ ID 412 | TCTATATTGATAAGTA | 0.87 |
| SEQ ID 73 | COMP ID 73 | CTACTTATCAATATAG | 108 | 123 | SEQ ID 413 | CTATATTGATAAGTAG | 0.83 |
| SEQ ID 74 | COMP ID 74 | GCTACTTATCAATATA | 109 | 124 | SEQ ID 414 | TATATTGATAAGTAGC | 0.64 |
| SEQ ID 75 | COMP ID 75 | GGCTACTTATCAATAT | 110 | 125 | SEQ ID 415 | ATATTGATAAGTAGCC | 0.71 |
| SEQ ID 76 | COMP ID 76 | TGGCTACTTATCAATA | 111 | 126 | SEQ ID 416 | TATTGATAAGTAGCCA | 0.81 |
| SEQ ID 77 | COMP ID 77 | TTGGCTACTTATCAAT | 112 | 127 | SEQ ID 417 | ATTGATAAGTAGCCAA | 0.48 |
| SEQ ID 78 | COMP ID 78 | ATTGGCTACTTATCAA | 113 | 128 | SEQ ID 418 | TTGATAAGTAGCCAAT | 0.88 |
| SEQ ID 79 | COMP ID 79 | CATTGGCTACTTATCA | 114 | 129 | SEQ ID 419 | TGATAAGTAGCCAATG | 0.72 |
| SEQ ID 80 | COMP ID 80 | CCATTGGCTACTTATC | 115 | 130 | SEQ ID 420 | GATAAGTAGCCAATGG | 0.53 |
| SEQ ID 81 | COMP ID 81 | CCCATTGGCTACTTAT | 116 | 131 | SEQ ID 421 | ATAAGTAGCCAATGGG | 0.63 |
| SEQ ID 82 | COMP ID 82 | TCCCATTGGCTACTTA | 117 | 132 | SEQ ID 422 | TAAGTAGCCAATGGGA | 0.53 |
| SEQ ID 83 | COMP ID 83 | CTCCCATTGGCTACTT | 118 | 133 | SEQ ID 423 | AAGTAGCCAATGGGAG | 0.57 |
| SEQ ID 84 | COMP ID 84 | GCTCCCATTGGCTACT | 119 | 134 | SEQ ID 424 | AGTAGCCAATGGGAGC | 0.52 |
| SEQ ID 85 | COMP ID 85 | CGCTCCCATTGGCTAC | 120 | 135 | SEQ ID 425 | GTAGCCAATGGGAGCG | 0.25 |
| SEQ ID 86 | COMP ID 86 | CCGCTCCCATTGGCTA | 121 | 136 | SEQ ID 426 | TAGCCAATGGGAGCGG | 0.37 |
| SEQ ID 87 | COMP ID 87 | CCCGCTCCCATTGGCT | 122 | 137 | SEQ ID 427 | AGCCAATGGGAGCGGG | 0.28 |
| SEQ ID 88 | COMP ID 88 | ACCCGCTCCCATTGGC | 123 | 138 | SEQ ID 428 | GCCAATGGGAGCGGGT | 0.30 |
| SEQ ID 89 | COMP ID 89 | TACCCGCTCCCATTGG | 124 | 139 | SEQ ID 429 | CCAATGGGAGCGGGTA | 0.43 |
| SEQ ID 90 | COMP ID 90 | CTACCCGCTCCCATTG | 125 | 140 | SEQ ID 430 | CAATGGGAGCGGGTAG | 0.38 |
| SEQ ID 91 | COMP ID 91 | GCTACCCGCTCCCATT | 126 | 141 | SEQ ID 431 | AATGGGAGCGGGTAGC | 0.65 |
| SEQ ID 92 | COMP ID 92 | GGCTACCCGCTCCCAT | 127 | 142 | SEQ ID 432 | ATGGGAGCGGGTAGCC | 0.51 |
| SEQ ID 93 | COMP ID 93 | GGGCTACCCGCTCCCA | 128 | 143 | SEQ ID 433 | TGGGAGCGGGTAGCCC | 0.38 |
| SEQ ID 94 | COMP ID 94 | AGGGCTACCCGCTCCC | 129 | 144 | SEQ ID 434 | GGGAGCGGGTAGCCCT | 0.50 |
| SEQ ID 95 | COMP ID 95 | CAGGGCTACCCGCTCC | 130 | 145 | SEQ ID 435 | GGAGCGGGTAGCCCTG | 0.45 |
| SEQ ID 96 | COMP ID 96 | TCAGGGCTACCCGCTC | 131 | 146 | SEQ ID 436 | GAGCGGGTAGCCCTGA | 0.50 |
| SEQ ID 97 | COMP ID 97 | ATCAGGGCTACCCGCT | 132 | 147 | SEQ ID 437 | AGCGGGTAGCCCTGAT | 0.39 |
| SEQ ID 98 | COMP ID 98 | GATCAGGGCTACCCGC | 133 | 148 | SEQ ID 438 | GCGGGTAGCCCTGATC | 0.31 |
| SEQ ID 99 | COMP ID 99 | GGATCAGGGCTACCCG | 134 | 149 | SEQ ID 439 | CGGGTAGCCCTGATCC | 0.32 |
| SEQ ID 100 | COMP ID 100 | GGGATCAGGGCTACCC | 135 | 150 | SEQ ID 440 | GGGTAGCCCTGATCCC | 0.56 |
| SEQ ID 101 | COMP ID 101 | AGGGATCAGGGCTACC | 136 | 151 | SEQ ID 441 | GGTAGCCCTGATCCCT | 0.41 |
| SEQ ID 102 | COMP ID 102 | CAGGGATCAGGGCTAC | 137 | 152 | SEQ ID 442 | GTAGCCCTGATCCCTG | 0.86 |
| SEQ ID 103 | COMP ID 103 | CCAGGGATCAGGGCTA | 138 | 153 | SEQ ID 443 | TAGCCCTGATCCCTGG | 0.65 |
| SEQ ID 104 | COMP ID 104 | GCCAGGGATCAGGGCT | 139 | 154 | SEQ ID 444 | AGCCCTGATCCCTGGC | 0.65 |
| SEQ ID 105 | COMP ID 105 | GGCCAGGGATCAGGGC | 140 | 155 | SEQ ID 445 | GCCCTGATCCCTGGCC | 1.00 |
| SEQ ID 106 | COMP ID 106 | TGGCCAGGGATCAGGG | 141 | 156 | SEQ ID 446 | CCCTGATCCCTGGCCA | 1.07 |
| SEQ ID 107 | COMP ID 107 | TTGGCCAGGGATCAGG | 142 | 157 | SEQ ID 447 | CCTGATCCCTGGCCAA | 0.52 |
| SEQ ID 108 | COMP ID 108 | ATTGGCCAGGGATCAG | 143 | 158 | SEQ ID 448 | CTGATCCCTGGCCAAT | 0.86 |
| SEQ ID 109 | COMP ID 109 | CATTGGCCAGGGATCA | 144 | 159 | SEQ ID 449 | TGATCCCTGGCCAATG | 0.67 |
| SEQ ID 110 | COMP ID 110 | CCATTGGCCAGGGATC | 145 | 160 | SEQ ID 450 | GATCCCTGGCCAATGG | 0.54 |
| SEQ ID 111 | COMP ID 111 | TCCATTGGCCAGGGAT | 146 | 161 | SEQ ID 451 | ATCCCTGGCCAATGGA | n.d. |
| SEQ ID 112 | COMP ID 112 | TTCCATTGGCCAGGGA | 147 | 162 | SEQ ID 452 | TCCCTGGCCAATGGAA | n.d. |
| SEQ ID 113 | COMP ID 113 | TTTCCATTGGCCAGGG | 148 | 163 | SEQ ID 453 | CCCTGGCCAATGGAAA | n.d. |
| SEQ ID 114 | COMP ID 114 | GTTTCCATTGGCCAGG | 149 | 164 | SEQ ID 454 | CCTGGCCAATGGAAAC | n.d. |
| SEQ ID 115 | COMP ID 115 | AGTTTCCATTGGCCAG | 150 | 165 | SEQ ID 455 | CTGGCCAATGGAAACT | 0.43 |
| SEQ ID 116 | COMP ID 116 | CAGTTTCCATTGGCCA | 151 | 166 | SEQ ID 456 | TGGCCAATGGAAACTG | 0.56 |
| SEQ ID 117 | COMP ID 117 | TCAGTTTCCATTGGCC | 152 | 167 | SEQ ID 457 | GGCCAATGGAAACTGA | 0.61 |
| SEQ ID 118 | COMP ID 118 | CTCAGTTTCCATTGGC | 153 | 168 | SEQ ID 458 | GCCAATGGAAACTGAG | 0.71 |
| SEQ ID 119 | COMP ID 119 | CCTCAGTTTCCATTGG | 154 | 169 | SEQ ID 459 | CCAATGGAAACTGAGG | 1.03 |
| SEQ ID 120 | COMP ID 120 | ACCTCAGTTTCCATTG | 155 | 170 | SEQ ID 460 | CAATGGAAACTGAGGT | 0.90 |
| SEQ ID 121 | COMP ID 121 | TACCTCAGTTTCCATT | 156 | 171 | SEQ ID 461 | AATGGAAACTGAGGTA | 0.95 |
| SEQ ID 122 | COMP ID 122 | CTACCTCAGTTTCCAT | 157 | 172 | SEQ ID 462 | ATGGAAACTGAGGTAG | 0.63 |
| SEQ ID 123 | COMP ID 123 | CCTACCTCAGTTTCCA | 158 | 173 | SEQ ID 463 | TGGAAACTGAGGTAGG | 0.62 |
| SEQ ID 124 | COMP ID 124 | GCCTACCTCAGTTTCC | 159 | 174 | SEQ ID 464 | GGAAACTGAGGTAGGC | 0.49 |
| SEQ ID 125 | COMP ID 125 | CGCCTACCTCAGTTTC | 160 | 175 | SEQ ID 465 | GAAACTGAGGTAGGCG | 1.18 |
| SEQ ID 126 | COMP ID 126 | CCGCCTACCTCAGTTT | 161 | 176 | SEQ ID 466 | AAACTGAGGTAGGCGG | 0.55 |
| SEQ ID 127 | COMP ID 127 | CCCGCCTACCTCAGTT | 162 | 177 | SEQ ID 467 | AACTGAGGTAGGCGGG | 0.72 |
| SEQ ID 128 | COMP ID 128 | ACCCGCCTACCTCAGT | 163 | 178 | SEQ ID 468 | ACTGAGGTAGGCGGGT | 0.44 |
| SEQ ID 129 | COMP ID 129 | GACCCGCCTACCTCAG | 164 | 179 | SEQ ID 469 | CTGAGGTAGGCGGGTC | 0.42 |
| SEQ ID 130 | COMP ID 130 | TGACCCGCCTACCTCA | 165 | 180 | SEQ ID 470 | TGAGGTAGGCGGGTCA | 0.28 |
| SEQ ID 131 | COMP ID 131 | ATGACCCGCCTACCTC | 166 | 181 | SEQ ID 471 | GAGGTAGGCGGGTCAT | 0.19 |
| SEQ ID 132 | COMP ID 132 | GATGACCCGCCTACCT | 167 | 182 | SEQ ID 472 | AGGTAGGCGGGTCATC | 0.18 |
| SEQ ID 133 | COMP ID 133 | CGATGACCCGCCTACC | 168 | 183 | SEQ ID 473 | GGTAGGCGGGTCATCG | 0.34 |
| SEQ ID 134 | COMP ID 134 | GCGATGACCCGCCTAC | 169 | 184 | SEQ ID 474 | GTAGGCGGGTCATCGC | 0.73 |
| SEQ ID 135 | COMP ID 135 | CGCGATGACCCGCCTA | 170 | 185 | SEQ ID 475 | TAGGCGGGTCATCGCG | 0.66 |
| SEQ ID 136 | COMP ID 136 | GCGCGATGACCCGCCT | 171 | 186 | SEQ ID 476 | AGGCGGGTCATCGCGC | 0.46 |
| SEQ ID 137 | COMP ID 137 | AGCGCGATGACCCGCC | 172 | 187 | SEQ ID 477 | GGCGGGTCATCGCGCT | 0.46 |
| SEQ ID 138 | COMP ID 138 | CAGCGCGATGACCCGC | 173 | 188 | SEQ ID 478 | GCGGGTCATCGCGCTG | 0.53 |
| SEQ ID 139 | COMP ID 139 | CCAGCGCGATGACCCG | 174 | 189 | SEQ ID 479 | CGGGTCATCGCGCTGG | 0.23 |
| SEQ ID 140 | COMP ID 140 | CCCAGCGCGATGACCC | 175 | 190 | SEQ ID 480 | GGGTCATCGCGCTGGG | 0.23 |
| SEQ ID 141 | COMP ID 141 | CCCCAGCGCGATGACC | 176 | 191 | SEQ ID 481 | GGTCATCGCGCTGGGG | 0.42 |
| SEQ ID 142 | COMP ID 142 | ACCCCAGCGCGATGAC | 177 | 192 | SEQ ID 482 | GTCATCGCGCTGGGGT | 0.30 |
| SEQ ID 143 | COMP ID 143 | GACCCCAGCGCGATGA | 178 | 193 | SEQ ID 483 | TCATCGCGCTGGGGTC | 0.63 |
| SEQ ID 144 | COMP ID 144 | AGACCCCAGCGCGATG | 179 | 194 | SEQ ID 484 | CATCGCGCTGGGGTCT | 0.57 |
| SEQ ID 145 | COMP ID 145 | CAGACCCCAGCGCGAT | 180 | 195 | SEQ ID 485 | ATCGCGCTGGGGTCTG | 0.31 |
| SEQ ID 146 | COMP ID 146 | ACAGACCCCAGCGCGA | 181 | 196 | SEQ ID 486 | TCGCGCTGGGGTCTGT | 0.29 |
| SEQ ID 147 | COMP ID 147 | TACAGACCCCAGCGCG | 182 | 197 | SEQ ID 487 | CGCGCTGGGGTCTGTA | 0.34 |
| SEQ ID 148 | COMP ID 148 | CTACAGACCCCAGCGC | 183 | 198 | SEQ ID 488 | GCGCTGGGGTCTGTAG | 0.32 |
| SEQ ID 149 | COMP ID 149 | ACTACAGACCCCAGCG | 184 | 199 | SEQ ID 489 | CGCTGGGGTCTGTAGT | 0.34 |
| SEQ ID 150 | COMP ID 150 | GACTACAGACCCCAGC | 185 | 200 | SEQ ID 490 | GCTGGGGTCTGTAGTC | 0.64 |
| SEQ ID 151 | COMP ID 151 | AGACTACAGACCCCAG | 186 | 201 | SEQ ID 491 | CTGGGGTCTGTAGTCT | 0.95 |
| SEQ ID 152 | COMP ID 152 | CAGACTACAGACCCCA | 187 | 202 | SEQ ID 492 | TGGGGTCTGTAGTCTG | 0.52 |
| SEQ ID 153 | COMP ID 153 | TCAGACTACAGACCCC | 188 | 203 | SEQ ID 493 | GGGGTCTGTAGTCTGA | 0.53 |
| SEQ ID 154 | COMP ID 154 | CTCAGACTACAGACCC | 189 | 204 | SEQ ID 494 | GGGTCTGTAGTCTGAG | 0.43 |
| SEQ ID 155 | COMP ID 155 | GCTCAGACTACAGACC | 190 | 205 | SEQ ID 495 | GGTCTGTAGTCTGAGC | 0.33 |
| SEQ ID 156 | COMP ID 156 | CGCTCAGACTACAGAC | 191 | 206 | SEQ ID 496 | GTCTGTAGTCTGAGCG | 0.43 |
| SEQ ID 157 | COMP ID 157 | GCGCTCAGACTACAGA | 192 | 207 | SEQ ID 497 | TCTGTAGTCTGAGCGC | 0.46 |
| SEQ ID 158 | COMP ID 158 | AGCGCTCAGACTACAG | 193 | 208 | SEQ ID 498 | CTGTAGTCTGAGCGCT | 0.80 |
| SEQ ID 159 | COMP ID 159 | TAGCGCTCAGACTACA | 194 | 209 | SEQ ID 499 | TGTAGTCTGAGCGCTA | 0.47 |
| SEQ ID 160 | COMP ID 160 | GTAGCGCTCAGACTAC | 195 | 210 | SEQ ID 500 | GTAGTCTGAGCGCTAC | 0.67 |
| SEQ ID 161 | COMP ID 161 | GGTAGCGCTCAGACTA | 196 | 211 | SEQ ID 501 | TAGTCTGAGCGCTACC | 0.74 |
| SEQ ID 162 | COMP ID 162 | GGGTAGCGCTCAGACT | 197 | 212 | SEQ ID 502 | AGTCTGAGCGCTACCC | 0.62 |
| SEQ ID 163 | COMP ID 163 | CGGGTAGCGCTCAGAC | 198 | 213 | SEQ ID 503 | GTCTGAGCGCTACCCG | 0.43 |
| SEQ ID 164 | COMP ID 164 | CCGGGTAGCGCTCAGA | 199 | 214 | SEQ ID 504 | TCTGAGCGCTACCCGG | 0.38 |
| SEQ ID 165 | COMP ID 165 | ACCGGGTAGCGCTCAG | 200 | 215 | SEQ ID 505 | CTGAGCGCTACCCGGT | 0.45 |
| SEQ ID 166 | COMP ID 166 | AACCGGGTAGCGCTCA | 201 | 216 | SEQ ID 506 | TGAGCGCTACCCGGTT | 0.61 |
| SEQ ID 167 | COMP ID 167 | CAACCGGGTAGCGCTC | 202 | 217 | SEQ ID 507 | GAGCGCTACCCGGTTG | 0.56 |
| SEQ ID 168 | COMP ID 168 | GCAACCGGGTAGCGCT | 203 | 218 | SEQ ID 508 | AGCGCTACCCGGTTGC | 0.50 |
| SEQ ID 169 | COMP ID 169 | AGCAACCGGGTAGCGC | 204 | 219 | SEQ ID 509 | GCGCTACCCGGTTGCT | 0.35 |
| SEQ ID 170 | COMP ID 170 | CAGCAACCGGGTAGCG | 205 | 220 | SEQ ID 510 | CGCTACCCGGTTGCTG | 0.21 |
| SEQ ID 171 | COMP ID 171 | GCAGCAACCGGGTAGC | 206 | 221 | SEQ ID 511 | GCTACCCGGTTGCTGC | 0.19 |
| SEQ ID 172 | COMP ID 172 | AGCAGCAACCGGGTAG | 207 | 222 | SEQ ID 512 | CTACCCGGTTGCTGCT | 0.26 |
| SEQ ID 173 | COMP ID 173 | CAGCAGCAACCGGGTA | 208 | 223 | SEQ ID 513 | TACCCGGTTGCTGCTG | 0.22 |
| SEQ ID 174 | COMP ID 174 | GCAGCAGCAACCGGGT | 209 | 224 | SEQ ID 514 | ACCCGGTTGCTGCTGC | 0.42 |
| SEQ ID 175 | COMP ID 175 | GGCAGCAGCAACCGGG | 210 | 225 | SEQ ID 515 | CCCGGTTGCTGCTGCC | 0.41 |
| SEQ ID 176 | COMP ID 176 | GGGCAGCAGCAACCGG | 211 | 226 | SEQ ID 516 | CCGGTTGCTGCTGCCC | 0.44 |
| SEQ ID 177 | COMP ID 177 | TGGGCAGCAGCAACCG | 212 | 227 | SEQ ID 517 | CGGTTGCTGCTGCCCA | 0.42 |
| SEQ ID 178 | COMP ID 178 | TTGGGCAGCAGCAACC | 213 | 228 | SEQ ID 518 | GGTTGCTGCTGCCCAA | 0.36 |
| SEQ ID 179 | COMP ID 179 | CTTGGGCAGCAGCAAC | 214 | 229 | SEQ ID 519 | GTTGCTGCTGCCCAAG | 0.28 |
| SEQ ID 180 | COMP ID 180 | CCTTGGGCAGCAGCAA | 215 | 230 | SEQ ID 520 | TTGCTGCTGCCCAAGG | 0.31 |
| SEQ ID 181 | COMP ID 181 | TCCTTGGGCAGCAGCA | 216 | 231 | SEQ ID 521 | TGCTGCTGCCCAAGGA | 0.26 |
| SEQ ID 182 | COMP ID 182 | GTCCTTGGGCAGCAGC | 217 | 232 | SEQ ID 522 | GCTGCTGCCCAAGGAC | 0.60 |
| SEQ ID 183 | COMP ID 183 | GGTCCTTGGGCAGCAG | 218 | 233 | SEQ ID 523 | CTGCTGCCCAAGGACC | 0.39 |
| SEQ ID 184 | COMP ID 184 | CGGTCCTTGGGCAGCA | 219 | 234 | SEQ ID 524 | TGCTGCCCAAGGACCG | 0.30 |
| SEQ ID 185 | COMP ID 185 | GCGGTCCTTGGGCAGC | 220 | 235 | SEQ ID 525 | GCTGCCCAAGGACCGC | 0.44 |
| SEQ ID 186 | COMP ID 186 | CGCGGTCCTTGGGCAG | 221 | 236 | SEQ ID 526 | CTGCCCAAGGACCGCG | 0.21 |
| SEQ ID 187 | COMP ID 187 | CCGCGGTCCTTGGGCA | 222 | 237 | SEQ ID 527 | TGCCCAAGGACCGCGG | 0.25 |
| SEQ ID 188 | COMP ID 188 | TCCGCGGTCCTTGGGC | 223 | 238 | SEQ ID 528 | GCCCAAGGACCGCGGA | 0.21 |
| SEQ ID 189 | COMP ID 189 | CTCCGCGGTCCTTGGG | 224 | 239 | SEQ ID 529 | CCCAAGGACCGCGGAG | 0.25 |
| SEQ ID 190 | COMP ID 190 | ACTCCGCGGTCCTTGG | 225 | 240 | SEQ ID 530 | CCAAGGACCGCGGAGT | 0.55 |
| SEQ ID 191 | COMP ID 191 | GACTCCGCGGTCCTTG | 226 | 241 | SEQ ID 531 | CAAGGACCGCGGAGTC | 0.33 |
| SEQ ID 192 | COMP ID 192 | CGACTCCGCGGTCCTT | 227 | 242 | SEQ ID 532 | AAGGACCGCGGAGTCG | 0.49 |
| SEQ ID 193 | COMP ID 193 | CCGACTCCGCGGTCCT | 228 | 243 | SEQ ID 533 | AGGACCGCGGAGTCGG | 0.23 |
| SEQ ID 194 | COMP ID 194 | TCCGACTCCGCGGTCC | 229 | 244 | SEQ ID 534 | GGACCGCGGAGTCGGA | 0.20 |
| SEQ ID 195 | COMP ID 195 | GTCCGACTCCGCGGTC | 230 | 245 | SEQ ID 535 | GACCGCGGAGTCGGAC | 0.25 |
| SEQ ID 196 | COMP ID 196 | CGTCCGACTCCGCGGT | 231 | 246 | SEQ ID 536 | ACCGCGGAGTCGGACG | 0.55 |
| SEQ ID 197 | COMP ID 197 | GCGTCCGACTCCGCGG | 232 | 247 | SEQ ID 537 | CCGCGGAGTCGGACGC | 0.41 |
| SEQ ID 198 | COMP ID 198 | TGCGTCCGACTCCGCT | 233 | 248 | SEQ ID 538 | CGCGGAGTCGGACGCA | 0.33 |
| SEQ ID 199 | COMP ID 199 | CTGCGTCCGACTCCGC | 234 | 249 | SEQ ID 539 | GCGGAGTCGGACGCAG | 0,180.47 |
| SEQ ID 200 | COMP ID 200 | CCTGCGTCCGACTCCG | 235 | 250 | SEQ ID 540 | CGGAGTCGGACGCAGG | 0,140.60 |
| SEQ ID 201 | COMP ID 201 | GCCTGCGTCCGACTCC | 236 | 251 | SEQ ID 541 | GGAGTCGGACGCAGGC | 0,150.62 |
| SEQ ID 202 | COMP ID 202 | TGCCTGCGTCCGACTC | 237 | 252 | SEQ ID 542 | GAGTCGGACGCAGGCA | 0,230.65 |
| SEQ ID 203 | COMP ID 203 | CTGCCTGCGTCCGACT | 238 | 253 | SEQ ID 543 | AGTCGGACGCAGGCAG | 0,270.85 |
| SEQ ID 204 | COMP ID 204 | TCTGCCTGCGTCCGAC | 239 | 254 | SEQ ID 544 | GTCGGACGCAGGCAGA | 0,270.81 |
| SEQ ID 205 | COMP ID 205 | GTCTGCCTGCGTCCGA | 240 | 255 | SEQ ID 545 | TCGGACGCAGGCAGAC | 0,220.53 |
| SEQ ID 206 | COMP ID 206 | GGTCTGCCTGCGTCCG | 241 | 256 | SEQ ID 546 | CGGACGCAGGCAGACC | 0,330.80 |

### Example 5

[0296] Antisense oligonucleotides were designed for the 5′ UTR from position 119 to 158 according to RefSeq NM_002087.3 (SEQ ID NO 1) with one nucleotide basepair shift as shown in table 2, which also provides the data from the luciferase assay, were a value of greater than 1 indicates an increased expression of progranulin (i.e. progranulin agonist activity of the antisense oligonucleotide), and a value lower than 1 indicates a decreased expression of progranulin (i.e. an inhibition or antagonistic effect, on progranulin expression).

[0297] The results from example 4 and 5 show that antisense oligonucleotide agonism was identified for several compounds targeting the progranulin 5′UTR, particularly compounds with a contiguous nucleotide complementary to nucleotides 1-229 of SEQ ID NO 1, such as compounds complementary to SEQ ID NO 445, SEQ ID NO: 446, SEQ ID NO: 459, SEQ ID NO 465, SEQ ID NO 683, SEQ ID NO 568, SEQ ID NO 571, SEQ ID NO 575, SEQ ID NO 576, SEQ ID NO 577, SEQ ID NO 578, SEQ ID NO 584, & SEQ ID NO 586.

[0298] Compounds 105, 106, 119, 125, 117, 228, 231, 235-8, 244 and 246 were identified as having progranulin agonist activity in the luciferase assay.

TABLE 2
All the antisense oligonucleotides are designed as 18-mers DNA-LNA mixmers with a
phosphorothioate backbone, DNA-LNA mixmers with a phosphorothioate backbone, LNA at the
very 5′ and 3′ position and e.g. LNA for every 2^{nd} or 3^{rd} nucleotide (see Compound table).

| | Compound | | | | | | |
|---|---|---|---|---|---|---|---|
| | ID | | RefSeq | | | | Relative |
| | number- | | NM_002087.3 | | Target | | luciferase |
| | See | Oligonucleotide | (SEQ ID NO 1) | | Site | | activity |
| | Compound | Sequence Motif | Start | End | Sequence | | Relative |
| SEQ ID | Table | (nucleobase Sequence) | Position | Position | ID | Target Site Sequence | to PBS) |
| SEQ | COMP ID | GCTCCCATTGGCTACTTA | 119 | 136 | SEQ ID | TAAGTAGCCAATGGGAGC | 0.32 |
| ID#207 | 207 | | | | 547 | | |
| SEQ | COMP ID | CGCTCCCATTGGCTACTT | 120 | 137 | SEQ ID | AAGTAGCCAATGGGAGCG | 0.22 |
| ID#208 | 208 | | | | 548 | | |
| SEQ | COMP ID | CCGCTCCCATTGGCTACT | 121 | 138 | SEQ ID | AGTAGCCAATGGGAGCGG | 0.19 |
| ID#209 | 209 | | | | 549 | | |
| SEQ | COMP ID | CCCGCTCCCATTGGCTAC | 122 | 139 | SEQ ID | GTAGCCAATGGGAGCGGG | 0.24 |
| ID#210 | 210 | | | | 550 | | |
| SEQ | COMP ID | ACCCGCTCCCATTGGCTA | 123 | 140 | SEQ ID | TAGCCAATGGGAGCGGGT | 0.37 |
| ID#211 | 211 | | | | 551 | | |
| SEQ | COMP ID | TACCCGCTCCCATTGGCT | 124 | 141 | SEQ ID | AGCCAATGGGAGCGGGTA | 0.38 |
| ID#212 | 212 | | | | 552 | | |
| SEQ | COMP ID | CTACCCGCTCCCATTGGC | 125 | 142 | SEQ ID | GCCAATGGGAGCGGGTAG | 0.39 |
| ID#213 | 213 | | | | 553 | | |
| SEQ | COMP ID | GCTACCCGCTCCCATTGG | 126 | 143 | SEQ ID | CCAATGGGAGCGGGTAGC | 0.47 |
| ID#214 | 214 | | | | 554 | | |
| SEQ | COMP ID | GGCTACCCGCTCCCATTG | 127 | 144 | SEQ ID | CAATGGGAGCGGGTAGCC | 0.55 |
| ID#215 | 215 | | | | 555 | | |
| SEQ | COMP ID | GGGCTACCCGCTCCCATT | 128 | 145 | SEQ ID | AATGGGAGCGGGTAGCCC | 0.53 |
| ID#216 | 216 | | | | 556 | | |
| SEQ | COMP ID | AGGGCTACCCGCTCCCAT | 129 | 146 | SEQ ID | ATGGGAGCGGGTAGCCCT | 0.56 |
| ID#217 | 217 | | | | 557 | | |
| SEQ | COMP ID | CAGGGCTACCCGCTCCCA | 130 | 147 | SEQ ID | TGGGAGCGGGTAGCCCTG | 0.49 |
| ID#218 | 218 | | | | 558 | | |
| SEQ | COMP ID | TCAGGGCTACCCGCTCCC | 131 | 148 | SEQ ID | GGGAGCGGGTAGCCCTGA | 0.58 |
| ID#219 | 219 | | | | 559 | | |
| SEQ | COMP ID | ATCAGGGCTACCCGCTCC | 132 | 149 | SEQ ID | GGAGCGGGTAGCCCTGAT | 0.48 |
| ID#220 | 220 | | | | 560 | | |
| SEQ | COMP ID | GATCAGGGCTACCCGCTC | 133 | 150 | SEQ ID | GAGCGGGTAGCCCTGATC | 0.49 |
| ID#221 | 221 | | | | 561 | | |
| SEQ | COMP ID | GGATCAGGGCTACCCGCT | 134 | 151 | SEQ ID | AGCGGGTAGCCCTGATCC | 0.38 |
| ID#222 | 222 | | | | 562 | | |
| SEQ | COMP ID | GGGATCAGGGCTACCCGC | 135 | 152 | SEQ ID | GCGGGTAGCCCTGATCCC | 0.33 |
| ID#223 | 223 | | | | 563 | | |
| SEQ | COMP ID | AGGGATCAGGGCTACCCG | 136 | 153 | SEQ ID | CGGGTAGCCCTGATCCCT | 0.36 |
| ID#224 | 224 | | | | 564 | | |
| SEQ | COMP ID | CAGGGATCAGGGCTACCC | 137 | 154 | SEQ ID | GGGTAGCCCTGATCCCTG | 0.48 |
| ID#225 | 225 | | | | 565 | | |
| SEQ | COMP ID | CCAGGGATCAGGGCTACC | 138 | 155 | SEQ ID | GGTAGCCCTGATCCCTGG | 0.69 |
| ID#226 | 226 | | | | 566 | | |
| SEQ | COMP ID | GCCAGGGATCAGGGCTAC | 139 | 156 | SEQ ID | GTAGCCCTGATCCCTGGC | 0.94 |
| ID#227 | 227 | | | | 567 | | |
| SEQ | COMP ID | GGCCAGGGATCAGGGCTA | 140 | 157 | SEQ ID | TAGCCCTGATCCCTGGCC | 1.15 |
| ID#228 | 228 | | | | 568 | | |
| SEQ | COMP ID | TGGCCAGGGATCAGGGCT | 141 | 158 | SEQ ID | AGCCCTGATCCCTGGCCA | 0.92 |
| ID#229 | 229 | | | | 569 | | |
| SEQ | COMP ID | TTGGCCAGGGATCAGGGC | 142 | 159 | SEQ ID | GCCCTGATCCCTGGCCAA | 0.85 |
| ID#230 | 230 | | | | 570 | | |
| SEQ | COMP ID | ATTGGCCAGGGATCAGGG | 143 | 160 | SEQ ID | CCCTGATCCCTGGCCAAT | 1.12 |
| ID#231 | 231 | | | | 571 | | |
| SEQ | COMP ID | CATTGGCCAGGGATCAGG | 144 | 161 | SEQ ID | CCTGATCCCTGGCCAATG | 0.72 |
| ID#232 | 232 | | | | 572 | | |
| SEQ | COMP ID | CCATTGGCCAGGGATCAG | 145 | 162 | SEQ ID | CTGATCCCTGGCCAATGG | 0.75 |
| ID#233 | 233 | | | | 573 | | |
| SEQ | COMP ID | TCCATTGGCCAGGGATCA | 146 | 163 | SEQ ID | TGATCCCTGGCCAATGGA | 0.97 |
| ID#234 | 234 | | | | 574 | | |
| SEQ | COMP ID | TTCCATTGGCCAGGGATC | 147 | 164 | SEQ ID | GATCCCTGGCCAATGGAA | 1.22 |
| ID#235 | 235 | | | | 575 | | |
| SEQ | COMP ID | TTTCCATTGGCCAGGGAT | 148 | 165 | SEQ ID | ATCCCTGGCCAATGGAAA | 1.13 |
| ID#236 | 236 | | | | 576 | | |
| SEQ | COMP ID | GTTTCCATTGGCCAGGGA | 149 | 166 | SEQ ID | TCCCTGGCCAATGGAAAC | 1.01 |
| ID#237 | 237 | | | | 577 | | |
| SEQ | COMP ID | AGTTTCCATTGGCCAGGG | 150 | 167 | SEQ ID | CCCTGGCCAATGGAAACT | 1.09 |
| ID#238 | 238 | | | | 578 | | |
| SEQ | COMP ID | CAGTTTCCATTGGCCAGG | 151 | 168 | SEQ ID | CCTGGCCAATGGAAACTG | 0.79 |
| ID#239 | 239 | | | | 579 | | |
| SEQ | COMP ID | TCAGTTTCCATTGGCCAG | 152 | 169 | SEQ ID | CTGGCCAATGGAAACTGA | 0.69 |
| ID#240 | 240 | | | | 580 | | |
| SEQ | COMP ID | CTCAGTTTCCATTGGCCA | 153 | 170 | SEQ ID | TGGCCAATGGAAACTGAG | 0.59 |
| ID#241 | 241 | | | | 581 | | |
| SEQ | COMP ID | CCTCAGTTTCCATTGGCC | 154 | 171 | SEQ ID | GGCCAATGGAAACTGAGG | 0.39 |
| ID#242 | 242 | | | | 582 | | |
| SEQ | COMP ID | ACCTCAGTTTCCATTGGC | 155 | 172 | SEQ ID | GCCAATGGAAACTGAGGT | 0.95 |
| ID#243 | 243 | | | | 583 | | |
| SEQ | COMP ID | TACCTCAGTTTCCATTGG | 156 | 173 | SEQ ID | CCAATGGAAACTGAGGTA | 1.12 |
| ID#244 | 244 | | | | 584 | | |
| SEQ | COMP ID | CTACCTCAGTTTCCATTG | 157 | 174 | SEQ ID | CAATGGAAACTGAGGTAG | 1.00 |
| ID#245 | 245 | | | | 585 | | |
| SEQ | COMP ID | CCTACCTCAGTTTCCATT | 158 | 175 | SEQ ID | AATGGAAACTGAGGTAGG | 1.26 |
| ID#246 | 246 | | | | 586 | | |

### Example 6

[0299] Antisense oligonucleotides were designed for the 3′ UTR from position 2044 to 2346 according to RefSeq NM_002807.3 with three nucleotide basepair shift as shown in table 3 which also provides the data from the luciferase assay, were a value of greater than 1 indicates an increased expression of progranulin (i.e. progranulin agonist activity of the antisense oligonucleotide), and a value lower than 1 indicates a decreased expression of progranulin (i.e. an inhibition or antagonistic effect, on progranulin expression).

[0300] The data shows antisense oligonucleotide antisense oligonucleotides with progranulin agonist activity that are complementary to the 3′UTR region of a human progranulin mRNA transcript were identified, for example compounds with a contiguous nucleotide sequence which is complementary to a sequence selected from the group consisting of SEQ ID NO 684, 685, 683, 686, 687, and 688, such as compounds with a contiguous nucleotide sequence which is complementary to a sequence selected from the group consisting of 607, 608, 609, 610, 611, 612, 619, 620, 633, 640, 641, 645, 651, and 652.

[0301] Compounds 263, 267, 269-272, 279, 280, 293, 300, 301, 305, 311, 312 and 327 were identified as exhibiting progranulin agonist activity in the luciferase assay system used.

TABLE 3
All the antisense oligonucleotides are designed as 18-mers DNA-LNA mixmers with a
phosphorothioate backbone, DNA-LNA mixmers with a phosphorothioate backbone, LNA at the
very 5′ and 3′ position and e.g. LNA for every 2^{nd} or 3^{rd} nucleotide (see Compound table).

| | | | RefSeq | | | | Relative |
|---|---|---|---|---|---|---|---|
| | Compound | | NM_002087.3 | | Target | | luciferase |
| | ID # | Oligonucleotide | (SEQ ID NO 1) | | Site | | activity |
| | (see | Sequence Motif | Start | End | Sequence | Target | Relative |
| SEQ ID | Compound | (nucleobase Sequence) | Position | Position | ID | Site Sequence | to PBS) |
| SEQ ID | COMP ID | 5′-TGCAGAGTCTTCAGTACT-3′ | 2044 | 2061 | SEQ ID | AGTACTGAAGACTCTGCA | 0.46 |
| #247 | 247 | | | | 587 | | |
| SEQ ID | COMP ID | 5′-GGCTGCAGAGTCTTCAGT-3′ | 2047 | 2064 | SEQ ID | ACTGAAGACTCTGCAGCC | 0.25 |
| #248 | 248 | | | | 588 | | |
| SEQ ID | COMP ID | 5′-GAGGGCTGCAGAGTCTTC-3′ | 2050 | 2067 | SEQ ID | GAAGACTCTGCAGCCCTC | 0.35 |
| #249 | 249 | | | | 589 | | |
| SEQ ID | COMP ID | 5′-CCCGAGGGCTGCAGAGTC-3′ | 2053 | 2070 | SEQ ID | GACTCTGCAGCCCTCGGG | 0.65 |
| #250 | 250 | | | | 590 | | |
| SEQ ID | COMP ID | 5′-GGTCCCGAGGGCTGCAGA-3′ | 2056 | 2073 | SEQ ID | TCTGCAGCCCTCGGGACC | 0.69 |
| #251 | 251 | | | | 591 | | |
| SEQ ID | COMP ID | 5′-TGGGGTCCCGAGGGCTGC-3′ | 2059 | 2076 | SEQ ID | GCAGCCCTCGGGACCCCA | 0.37 |
| #252 | 252 | | | | 592 | | |
| SEQ ID | COMP ID | 5′-GAGTGGGGTCCCGAGGGC-3′ | 2062 | 2079 | SEQ ID | GCCCTCGGGACCCCACTC | 0.77 |
| #253 | 253 | | | | 593 | | |
| SEQ ID | COMP ID | 5′-TCCGAGTGGGGTCCCGAG-3′ | 2065 | 2082 | SEQ ID | CTCGGGACCCCACTCGGA | 0.75 |
| #254 | 254 | | | | 594 | | |
| SEQ ID | COMP ID | 5′-CCCTCCGAGTGGGGTCCC-3′ | 2068 | 2085 | SEQ ID | GGGACCCCACTCGGAGGG | 0.67 |
| #255 | 255 | | | | 595 | | |
| SEQ ID | COMP ID | 5′-GCACCCTCCGAGTGGGGT-3′ | 2071 | 2088 | SEQ ID | ACCCCACTCGGAGGGTGC | 0.57 |
| #256 | 256 | | | | 596 | | |
| SEQ ID | COMP ID | 5′-AGGGCACCCTCCGAGTGG-3′ | 2074 | 2091 | SEQ ID | CCACTCGGAGGGTGCCCT | 0.78 |
| #257 | 257 | | | | 597 | | |
| SEQ ID | COMP ID | 5′-CAGAGGGCACCCTCCGAG-3′ | 2077 | 2094 | SEQ ID | CTCGGAGGGTGCCCTCTG | 0.92 |
| #258 | 258 | | | | 598 | | |
| SEQ ID | COMP ID | 5′-GAGCAGAGGGCACCCTCC-3′ | 2080 | 2097 | SEQ ID | GGAGGGTGCCCTCTGCTC | 0.29 |
| #259 | 259 | | | | 599 | | |
| SEQ ID | COMP ID | 5′-CCTGAGCAGAGGGCACCC-3′ | 2083 | 2100 | SEQ ID | GGGTGCCCTCTGCTCAGG | 0.63 |
| #260 | 260 | | | | 600 | | |
| SEQ ID | COMP ID | 5′-AGGCCTGAGCAGAGGGCA-3′ | 2086 | 2103 | SEQ ID | TGCCCTCTGCTCAGGCCT | 0.56 |
| #261 | 261 | | | | 601 | | |
| SEQ ID | COMP ID | 5′-GGGAGGCCTGAGCAGAGG-3′ | 2089 | 2106 | SEQ ID | CCTCTGCTCAGGCCTCCC | 0.74 |
| #262 | 262 | | | | 602 | | |
| SEQ ID | COMP ID | 5′-CTAGGGAGGCCTGAGCAG-3′ | 2092 | 2109 | SEQ ID | CTGCTCAGGCCTCCCTAG | 1.13 |
| #263 | 263 | | | | 603 | | |
| SEQ ID | COMP ID | 5′-GTGCTAGGGAGGCCTGAG-3′ | 2095 | 2112 | SEQ ID | CTCAGGCCTCCCTAGCAC | 0.99 |
| #264 | 264 | | | | 604 | | |
| SEQ ID | COMP ID | 5′-GAGGTGCTAGGGAGGCCT-3′ | 2098 | 2115 | SEQ ID | AGGCCTCCCTAGCACCTC | 0.83 |
| #265 | 265 | | | | 605 | | |
| SEQ ID | COMP ID | 5′-GGGGAGGTGCTAGGGAGG-3′ | 2101 | 2118 | SEQ ID | CCTCCCTAGCACCTCCCC | 0.89 |
| #266 | 266 | | | | 606 | | |
| SEQ ID | COMP ID | 5′-TAGGGGGAGGTGCTAGGG-3′ | 2104 | 2121 | SEQ ID | CCCTAGCACCTCCCCCTA | 1.27 |
| #267 | 267 | | | | 607 | | |
| SEQ ID | COMP ID | 5′-GGTTAGGGGGAGGTGCTA-3′ | 2107 | 2124 | SEQ ID | TAGCACCTCCCCCTAACC | 0.58 |
| #268 | 268 | | | | 608 | | |
| SEQ ID | COMP ID | 5′-TTTGGTTAGGGGGAGGTG-3′ | 2110 | 2127 | SEQ ID | CACCTCCCCCTAACCAAA | 1.09 |
| #269 | 269 | | | | 609 | | |
| SEQ ID | COMP ID | 5′-GAATTTGGTTAGGGGGAG-3′ | 2113 | 2130 | SEQ ID | CTCCCCCTAACCAAATTC | 1.24 |
| #270 | 270 | | | | 610 | | |
| SEQ ID | COMP ID | 5′-GGAGAATTTGGTTAGGGG-3′ | 2116 | 2133 | SEQ ID | CCCCTAACCAAATTCTCC | 1.05 |
| #271 | 271 | | | | 611 | | |
| SEQ ID | COMP ID | 5′-CAGGGAGAATTTGGTTAG-3′ | 2119 | 2136 | SEQ ID | CTAACCAAATTCTCCCTG | 1.04 |
| #272 | 272 | | | | 612 | | |
| SEQ ID | COMP ID | 5′-GTCCAGGGAGAATTTGGT-3′ | 2122 | 2139 | SEQ ID | ACCAAATTCTCCCTGGAC | 0.94 |
| #273 | 273 | | | | 613 | | |
| SEQ ID | COMP ID | 5′-GGGGTCCAGGGAGAATTT-3′ | 2125 | 2142 | SEQ ID | AAATTCTCCCTGGACCCC | 0.89 |
| #274 | 274 | | | | 614 | | |
| SEQ ID | COMP ID | 5′-AATGGGGTCCAGGGAGAA-3′ | 2128 | 2145 | SEQ ID | TTCTCCCTGGACCCCATT | 0.99 |
| #275 | 275 | | | | 615 | | |
| SEQ ID | COMP ID | 5′-CAGAATGGGGTCCAGGGA-3′ | 2131 | 2148 | SEQ ID | TCCCTGGACCCCATTCTG | 0.60 |
| #276 | 276 | | | | 616 | | |
| SEQ ID | COMP ID | 5′-GCTCAGAATGGGGTCCAG-3′ | 2134 | 2151 | SEQ ID | CTGGACCCCATTCTGAGC | 0.52 |
| #277 | 277 | | | | 617 | | |
| SEQ ID | COMP ID | 5′-GGAGCTCAGAATGGGGTC-3′ | 2137 | 2154 | SEQ ID | GACCCCATTCTGAGCTCC | 0.91 |
| #278 | 278 | | | | 618 | | |
| SEQ ID | COMP ID | 5′-TGGGGAGCTCAGAATGGG-3′ | 2140 | 2157 | SEQ ID | CCCATTCTGAGCTCCCCA | 1.14 |
| #279 | 279 | | | | 619 | | |
| SEQ ID | COMP ID | 5′-TGATGGGGAGCTCAGAAT-3′ | 2143 | 2160 | SEQ ID | ATTCTGAGCTCCCCATCA | 1.11 |
| #280 | 280 | | | | 620 | | |
| SEQ ID | COMP ID | 5′-TGGTGATGGGGAGCTCAG-3′ | 2156 | 2163 | SEQ ID | CTGAGCTCCCCATCACCA | 0.97 |
| #281 | 281 | | | | 621 | | |
| SEQ ID | COMP ID | 5′-CCATGGTGATGGGGAGCT-3′ | 2149 | 2166 | SEQ ID | AGCTCCCCATCACCATGG | 0.97 |
| #282 | 282 | | | | 622 | | |
| SEQ ID | COMP ID | 5′-CTCCCATGGTGATGGGGA-3′ | 2152 | 2169 | SEQ ID | TCCCCATCACCATGGGAG | 0.81 |
| #283 | 283 | | | | 623 | | |
| SEQ ID | COMP ID | 5′-CACCTCCCATGGTGATGG-3′ | 2155 | 2172 | SEQ ID | CCATCACCATGGGAGGTG | 0.69 |
| #284 | 284 | | | | 624 | | |
| SEQ ID | COMP ID | 5′-CCCCACCTCCCATGGTGA-3′ | 2158 | 2175 | SEQ ID | TCACCATGGGAGGTGGGG | 0.69 |
| #285 | 285 | | | | 625 | | |
| SEQ ID | COMP ID | 5′-AGGCCCCACCTCCCATGG-3′ | 2161 | 2178 | SEQ ID | CCATGGGAGGTGGGGCCT | 0.58 |
| #286 | 286 | | | | 626 | | |
| SEQ ID | COMP ID | 5′-TTGAGGCCCCACCTCCCA-3′ | 2164 | 2181 | SEQ ID | TGGGAGGTGGGGCCTCAA | 0.47 |
| #287 | 287 | | | | 627 | | |
| SEQ ID | COMP ID | 5′-AGATTGAGGCCCCACCTC-3′ | 2167 | 2184 | SEQ ID | GAGGTGGGGCCTCAATCT | 0.59 |
| #288 | 288 | | | | 628 | | |
| SEQ ID | COMP ID | 5′-CTTAGATTGAGGCCCCAC-3′ | 2170 | 2187 | SEQ ID | GTGGGGCCTCAATCTAAG | 0.38 |
| #289 | 289 | | | | 629 | | |
| SEQ ID | COMP ID | 5′-GGCCTTAGATTGAGGCCC-3′ | 2173 | 2190 | SEQ ID | GGGCCTCAATCTAAGGCC | 0.43 |
| #290 | 290 | | | | 630 | | |
| SEQ ID | COMP ID | 5′-GAAGGCCTTAGATTGAGG-3′ | 2176 | 2193 | SEQ ID | CCTCAATCTAAGGCCTTC | 0.76 |
| #291 | 291 | | | | 631 | | |
| SEQ ID | COMP ID | 5′-AGGGAAGGCCTTAGATTG-3′ | 2179 | 2196 | SEQ ID | CAATCTAAGGCCTTCCCT | 0.86 |
| #292 | 292 | | | | 632 | | |
| SEQ ID | COMP ID | 5′-GACAGGGAAGGCCTTAGA-3′ | 2182 | 2199 | SEQ ID | TCTAAGGCCTTCCCTGTC | 1.04 |
| #293 | 293 | | | | 633 | | |
| SEQ ID | COMP ID | 5′-TCTGACAGGGAAGGCCTT-3′ | 2185 | 2202 | SEQ ID | AAGGCCTTCCCTGTCAGA | 0.81 |
| #294 | 294 | | | | 634 | | |
| SEQ ID | COMP ID | 5′-CCTTCTGACAGGGAAGGC-3′ | 2188 | 2205 | SEQ ID | GCCTTCCCTGTCAGAAGG | 0.89 |
| #295 | 295 | | | | 635 | | |
| SEQ ID | COMP ID | 5′-CCCCCTTCTGACAGGGAA-3′ | 2191 | 2208 | SEQ ID | TTCCCTGTCAGAAGGGGG | 0.71 |
| #296 | 296 | | | | 636 | | |
| SEQ ID | COMP ID | 5′-CAACCCCCTTCTGACAGG-3′ | 2194 | 2211 | SEQ ID | CCTGTCAGAAGGGGGTTG | 0.89 |
| #297 | 297 | | | | 637 | | |
| SEQ ID | COMP ID | 5′-CCACAACCCCCTTCTGAC-3′ | 2197 | 2214 | SEQ ID | GTCAGAAGGGGGTTGTGG | 0.42 |
| #298 | 298 | | | | 638 | | |
| SEQ ID | COMP ID | 5′-TTGCCACAACCCCCTTCT-3′ | 2200 | 2217 | SEQ ID | AGAAGGGGGTTGTGGCAA | 0.88 |
| #299 | 299 | | | | 639 | | |
| SEQ ID | COMP ID | 5′-CTTTTGCCACAACCCCCT-3′ | 2203 | 2220 | SEQ ID | AGGGGGTTGTGGCAAAAG | 1.16 |
| #300 | 300 | | | | 640 | | |
| SEQ ID | COMP ID | 5′-TGGCTTTTGCCACAACCC-3′ | 2206 | 2223 | SEQ ID | GGGTTGTGGCAAAAGCCA | 1.08 |
| #301 | 301 | | | | 641 | | |
| SEQ ID | COMP ID | 5′-ATGTGGCTTTTGCCACAA-3′ | 2209 | 2226 | SEQ ID | TTGTGGCAAAAGCCACAT | 1.01 |
| #302 | 302 | | | | 642 | | |
| SEQ ID | COMP ID | 5′-GTAATGTGGCTTTTGCCA-3′ | 2212 | 2229 | SEQ ID | TGGCAAAAGCCACATTAC | 0.55 |
| #303 | 303 | | | | 643 | | |
| SEQ ID | COMP ID | 5′-CTTGTAATGTGGCTTTTG-3′ | 2215 | 2232 | SEQ ID | CAAAAGCCACATTACAAG | 1.01 |
| #304 | 304 | | | | 644 | | |
| SEQ ID | COMP ID | 5′-CAGCTTGTAATGTGGCTT-3′ | 2218 | 2235 | SEQ ID | AAGCCACATTACAAGCTG | 1.50 |
| #305 | 305 | | | | 645 | | |
| SEQ ID | COMP ID | 5′-TGGCAGCTTGTAATGTGG-3′ | 2221 | 2238 | SEQ ID | CCACATTACAAGCTGCCA | 0.96 |
| #306 | 306 | | | | 646 | | |
| SEQ ID | COMP ID | 5′-GGATGGCAGCTTGTAATG-3′ | 2224 | 2241 | SEQ ID | CATTACAAGCTGCCATCC | 0.74 |
| #307 | 307 | | | | 647 | | |
| SEQ ID | COMP ID | 5′-AGGGGATGGCAGCTTGTA-3′ | 2227 | 2244 | SEQ ID | TACAAGCTGCCATCCCCT | 0.84 |
| #308 | 308 | | | | 648 | | |
| SEQ ID | COMP ID | 5′-GGGAGGGGATGGCAGCTT-3′ | 2230 | 2247 | SEQ ID | AAGCTGCCATCCCCTCCC | 0.63 |
| #309 | 309 | | | | 649 | | |
| SEQ ID | COMP ID | 5′-ACGGGGAGGGGATGGCAG-3′ | 2233 | 2250 | SEQ ID | CTGCCATCCCCTCCCCGT | 0.71 |
| #310 | 310 | | | | 650 | | |
| SEQ ID | COMP ID | 5′-GAAACGGGGAGGGGATGG-3′ | 2236 | 2253 | SEQ ID | CCATCCCCTCCCCGTTTC | 1.06 |
| #311 | 311 | | | | 651 | | |
| SEQ ID | COMP ID | 5′-ACTGAAACGGGGAGGGGA-3′ | 2239 | 2256 | SEQ ID | TCCCCTCCCCGTTTCAGT | 1.08 |
| #312 | 312 | | | | 652 | | |
| SEQ ID | COMP ID | 5′-TCCACTGAAACGGGGAGG-3′ | 2242 | 2259 | SEQ ID | CCTCCCCGTTTCAGTGGA | 0.53 |
| #313 | 313 | | | | 653 | | |
| SEQ ID | COMP ID | 5′-GGGTCCACTGAAACGGGG-3′ | 2245 | 2262 | SEQ ID | CCCCGTTTCAGTGGACCC | 0.93 |
| #314 | 314 | | | | 654 | | |
| SEQ ID | COMP ID | 5′-ACAGGGTCCACTGAAACG-3′ | 2248 | 2265 | SEQ ID | CGTTTCAGTGGACCCTGT | 0.49 |
| #315 | 315 | | | | 655 | | |
| SEQ ID | COMP ID | 5′-GCCACAGGGTCCACTGAA-3′ | 2251 | 2268 | SEQ ID | TTCAGTGGACCCTGTGGC | 0.57 |
| #316 | 316 | | | | 656 | | |
| SEQ ID | COMP ID | 5′-CTGGCCACAGGGTCCACT-3′ | 2254 | 2271 | SEQ ID | AGTGGACCCTGTGGCCAG | 0.51 |
| #317 | 317 | | | | 657 | | |
| SEQ ID | COMP ID | 5′-CACCTGGCCACAGGGTCC-3′ | 2257 | 2274 | SEQ ID | GGACCCTGTGGCCAGGTG | 0.73 |
| #318 | 318 | | | | 658 | | |
| SEQ ID | COMP ID | 5′-AAGCACCTGGCCACAGGG-3′ | 2260 | 2277 | SEQ ID | CCCTGTGGCCAGGTGCTT | 0.43 |
| #319 | 319 | | | | 659 | | |
| SEQ ID | COMP ID | 5′-GAAAAGCACCTGGCCACA-3′ | 2263 | 2280 | SEQ ID | TGTGGCCAGGTGCTTTTC | 0.33 |
| #320 | 320 | | | | 660 | | |
| SEQ ID | COMP ID | 5′-AGGGAAAAGCACCTGGCC-3′ | 2266 | 2283 | SEQ ID | GGCCAGGTGCTTTTCCCT | 0.16 |
| #321 | 321 | | | | 661 | | |
| SEQ ID | COMP ID | 5′-GATAGGGAAAAGCACCTG-3′ | 2269 | 2286 | SEQ ID | CAGGTGCTTTTCCCTATC | 0.65 |
| #322 | 322 | | | | 662 | | |
| SEQ ID | COMP ID | 5′-GTGGATAGGGAAAAGCAC-3′ | 2272 | 2289 | SEQ ID | GTGCTTTTCCCTATCCAC | 0.54 |
| #323 | 323 | | | | 663 | | |
| SEQ ID | COMP ID | 5′-CCTGTGGATAGGGAAAAG-3′ | 2275 | 2292 | SEQ ID | CTTTTCCCTATCCACAGG | 0.63 |
| #324 | 324 | | | | 664 | | |
| SEQ ID | COMP ID | 5′-ACCCCTGTGGATAGGGAA-3′ | 2278 | 2295 | SEQ ID | TTCCCTATCCACAGGGGT | 0.29 |
| #325 | 325 | | | | 665 | | |
| SEQ ID | COMP ID | 5′-AACACCCCTGTGGATAGG-3′ | 2281 | 2298 | SEQ ID | CCTATCCACAGGGGTGTT | 0.62 |
| #326 | 326 | | | | 666 | | |
| SEQ ID | COMP ID | 5′-ACAAACACCCCTGTGGAT-3′ | 2284 | 2301 | SEQ ID | ATCCACAGGGGTGTTTGT | 1.08 |
| #327 | 327 | | | | 667 | | |
| SEQ ID | COMP ID | 5′-CACACAAACACCCCTGTG-3′ | 2287 | 2304 | SEQ ID | CACAGGGGTGTTTGTGTG | 0.81 |
| #328 | 328 | | | | 668 | | |
| SEQ ID | COMP ID | 5′-ACACACACAAACACCCCT-3′ | 2290 | 2307 | SEQ ID | AGGGGTGTTTGTGTGTGT | 0.88 |
| #329 | 329 | | | | 669 | | |
| SEQ ID | COMP ID | 5′-CGCACACACACAAACACC-3′ | 2293 | 2310 | SEQ ID | GGTGTTTGTGTGTGTGCG | 0.60 |
| #330 | 330 | | | | 670 | | |
| SEQ ID | COMP ID | 5′-ACGCGCACACACACAAAC-3′ | 2296 | 2313 | SEQ ID | GTTTGTGTGTGTGCGCGT | 0.68 |
| #331 | 331 | | | | 671 | | |
| SEQ ID | COMP ID | 5′-CACACGCGCACACACACA-3′ | 2299 | 2316 | SEQ ID | TGTGTGTGTGCGCGTGTG | 0.51 |
| #332 | 332 | | | | 672 | | |
| SEQ ID | COMP ID | 5′-ACGCACACGCGCACACAC-3′ | 2302 | 2319 | SEQ ID | GTGTGTGCGCGTGTGCGT | 0.25 |
| #333 | 333 | | | | 673 | | |
| SEQ ID | COMP ID | 5′-GAAACGCACACGCGCACA-3′ | 2305 | 2322 | SEQ ID | TGTGCGCGTGTGCGTTTC | 0.66 |
| #334 | 334 | | | | 674 | | |
| SEQ ID | COMP ID | 5′-ATTGAAACGCACACGCGC-3′ | 2308 | 2325 | SEQ ID | GCGCGTGTGCGTTTCAAT | 0.82 |
| #335 | 335 | | | | 675 | | |
| SEQ ID | COMP ID | 5′-TTTATTGAAACGCACACG-3′ | 2311 | 2328 | SEQ ID | CGTGTGCGTTTCAATAAA | 0.76 |
| #336 | 336 | | | | 676 | | |
| SEQ ID | COMP ID | 5′-AACTTTATTGAAACGCAC-3′ | 2314 | 2331 | SEQ ID | GTGCGTTTCAATAAAGTT | 0.73 |
| #337 | 337 | | | | 677 | | |
| SEQ ID | COMP ID | 5′-ACAAACTTTATTGAAACG-3′ | 2317 | 2334 | SEQ ID | CGTTTCAATAAAGTTTGT | 0.84 |
| #338 | 338 | | | | 678 | | |
| SEQ ID | COMP ID | 5′-TGTACAAACTTTATTGAA-3′ | 2320 | 2337 | SEQ ID | TTCAATAAAGTTTGTACA | 0.98 |
| #339 | 339 | | | | 679 | | |
| SEQ ID | COMP ID | 5′-AAGTGTACAAACTTTATT-3′ | 2323 | 2340 | SEQ ID | AATAAAGTTTGTACACTT | 0.87 |
| #340 | 340 | | | | 680 | | |
| SEQ ID | COMP ID | 5′-AGAAAGTGTACAAACTTT-3′ | 2326 | 2343 | SEQ ID | AAAGTTTGTACACTTTCT | 0.72 |
| #341 | 341 | | | | 681 | | |
| SEQ ID | COMP ID | 5′-TTAAGAAAGTGTACAAAC-3′ | 2329 | 2346 | SEQ ID | GTTTGTACACTTTCTTAA | 0.87 |
| #342 | 342 | | | | 682 | | |

### Example 7: 16-Mer Oligos Targeting the 5′ UTR

[0302] 16-mer Oligos targeting 5′ UTR uORF region (SEQ ID Nos 95-136) were selected, prepared and profiled for effects on Progranulin protein expression.

[0303] H4 neuroglioma cells were seeded in 96 well plates 5000 pr well, and treated with 10 μM final concentration of compounds for 5 days in 200 μL medium.

[0304] Microglia cells were chosen for analysis because these cells produce high levels of progranulin. Reduction of progranulin in microglia cells alone is sufficient to effect inflammation, lysosomal dysfunction, and hyperproliferation in a cell-autonomous manner. Therefore, targeting microglial dysfunction caused by progranulin insufficiency represents a potential therapeutic strategy to manage neurodegeneration in Frontotemporal dementia. To study effects on Progranulin in cellular systems, H4 cells (ATCC HTB-148) a commercial available glial cell line derived from a cancer patient have been used for identifying oligonucleotides capable of increasing progranulin production.

[0305] To further use Microglia that exhibit functional characteristics similar to human microglia, including phagocytosis and cytokine-mediated inflammatory responses, and express relevant microglial markers, hiPSC derived microglia iCell® Microglia from FujiFilm Cellular Dynamics Inc. (Cat. no R1131) have been used for investigating effects of selected oligonucleotides on progranulin production.

[0306] Progranulin expression levels were evaluated in media after dilution 1:8 by ELISA from Abcam (ab252364). Compound #105, #106, #110, #113 and #114 induced progranulin secretion more than 150% compared to PBS as shown in FIG. 1.

[0307] Compounds #105, #106, #110 and #114 localise on the 5′ UTR of Progranulin transcript, targeting the uORF region as shown in FIG. 2.

[0308] H4 cells were seeded in 96 well plates 5000 pr well, and treated with 10 μM final concentration of compounds for 5 days in 200 μL medium. Progranulin expression levels were evaluated in cell lysate (RIPA lysis and extraction buffer from Pierce cat. No. 89900) using the WES platform (ProteinSimple) and GRN antibody Invitrogen PA5-27275 diluted 1:25 and HPRT1 antibody ab109021 (Abcam) diluted 1:50. GRN expression was normalized to endogenous housekeeping protein HPRT1.

[0309] Compounds #106, #110, and #114 induced Progranulin in cell lysate compared to PBS as shown in FIGS. 3 and 4.

### Example 8: Compound #106

[0310] hiPSC derived microglia (iCell Microglia Kit, 01279, Cat. no R1131) were seeded in 48 well plates with 100000 pr well in 500 μL, and were treated with varying concentrations of Compound #106 for 5 days.

[0311] Progranulin expression levels were evaluated in media after dilution 1:8 by ELISA from Abcam (ab252364).

[0312] Compound #106 (n=3) dose-dependently induced Progranulin secretion compared to PBS as shown in FIG. 5.

### Example 9: 18-Mer Oligos Targeting 5′ UTR

[0313] 18-mer Oligos targeting 5′ UTR uORF region (SEQ ID NOs: 207-245) were selected, prepared and profiled for effects on Progranulin protein expression.

[0314] H4 neuroglioma cells were seeded in 96 well plates 5000 pr well and treated with 10 μM final concentration of compounds for 5 days in 200 μL medium. Progranulin expression levels were evaluated in media after dilution 1:8 by ELISA from Abcam (ab252364).

[0315] Compound #231 and #241 induced Progranulin secretion compared to PBS as shown in FIG. 6.

### Example 10: Compound #106

[0316] The structure of Compound ID #106 (SEQ ID NO 106) inducing upregulation of Progranulin in both H4 cells and hiPSC derived Microglia cells, is shown in FIG. 7.

### Example 11: Full 2′MOE and 2′oMe Modified Versions of SEQ ID NO: 106

[0317] SEQ ID NO: 106 (TGGCCAGGGATCAGGG) was tested as both a full 2′MOE modified oligo (Compound #106 full 2′MOE) and a full 2′oMe modified oligo (Compound #106 full 2′oMe).

[0318] H4 neuroglioma cells seeded in 96 well plates 5000 pr well were treated with 10 μM final concentration of compounds for 5 days in 200 μL medium. Progranulin expression levels were evaluated in media after dilution 1:8 by ELISA from Abcam (ab252364). Compound #106 and Compound #106 full 2′MOE and Compound #106 full 2′oMe induced a ˜2-fold increase in progranulin secretion to the media compared to PBS.

### Example 12: Gene Transcript Regulation by Compound #106, Compound #106 Full 2′MOE and Compound #106 Full 2′oMe

[0319] To understand the number of gene transcripts regulated by compound #106, Compound #106 full 2′MOE and Compound #106 full 2′oMe, H4 neuroglioma cells seeded in 48 well plates 15000 per well were treated with 10 μM final concentration of compounds for 5 days in 500 μL medium, mRNA was isolated using the MagNAPure 96 system (Roche) according to manufacturer's protocol. The purified mRNA were sent for gene expression array analysis at Eurofins Genomics, using Clariom™ S Arrays (ThermoFisher Scientific). Expression analysis was conducted using the Qlucore Omics Explorer software, using a two-group comparison and by adjusting the FDR<0.1. The number of genes regulated more than 2-fold either up and down compared to PBS were identified. Compound #106 showed 1207 genes regulated more than 2-fold, Compound #106 full 2′oMe showed 782 genes regulated more than 2-fold, whereas Compound #106 full 2′MOE only showed 43 transcripts regulated. FIG. 9 shows that Compound #106 full 2′MOE has less off-targets compared to compound #106 and Compound #106 full 2′oMe.

[0320] The genes regulated more than 2-fold with a FDR<0.1 are shown below.

[0321] Genes regulated more than 2-fold with a FDR<0.1 following treatment with Compound #106: AATF, ABCA1, ABCC2, ABCC3, ABCG1, ABLIM3, ACAT2, ACKR3, ACSLS, ACSS3, ACTA2, ACVR1B, ADAM9, ADAMTSI6, ADAMTS19, ADAMTS3, ADAMTSL4, ADGRA3, ADGRB3, ADI1, ADRBK1, ADRM1, ADSL, AFAP1, AGT, AHCY, AH11, AHNAK2, AHR, AJAP1, AKAP6, ALCAM, ALDH1L2, ALDH3A1, ALDOA, ALDOC, ALG8, ALKBH5, ALPK2, ALYREF, AMMECR1, AMMECR1L, AMPD2, AMTN, ANGPT1, ANK3, ANKRD18A, ANKRD44, ANLN, ANO7, ANPEP, ANTXR2, ANXA1, AOAH, APCDD1, APEX1, APH1A, APOBEC3B, APOL2, APOL3, APRT, AQP1, AQP3, ARAF, ARCN1, ARHGAP11B, ARHGAP35, ARHGAP8, ARHGEF2, ARL4A, ARMC6, ARPC4, ARPC4-TTLL3, ARRDC3, ARRDC4, ARSG, ASNA1, ASNS, ASPM, ASS1, ATAD2, ATN1, ATP6AP1L, ATP6V0A1, ATP8B3, ATXN2, ATXN2L, AVEN, B4GALT5, BCAM, BCL6, BDNF, BEX1, BHLHE40, BIRC5, BLID, BLM, BMP5, BNC2, BNIP3, BNIP3L, BSG, BTAF1, BUB1B, C10orf10, C10orf107, C12orf76, C17orf89, CIRL, C1orf174, C1orf21, C1orf52, C1orf53, C20orf24, C7orf26, C7orf73, C8orf4, C8orf48, C8orf58, CA12, CA5B, CA9, CACNG4, CACYBP, CALCOCO1, CALR, CAMK4, CAPNS1, CAPZB, CASC5, CASK, CBLB, CCBL1, CCDC102B, CCDC150, CCDC163P, CCDC34, CCNA2, CCNB1, CCNB2, CCND1, CCNE2, CCPG1, CCT2, CD151, CD24, CD55, CD96, CD99, CD99, CDC20, CDC42SE1, CDC45, CDC6, CDCA5, CDCA8, CDH6, CDH8, CDK1, CDKN1A, CDKN3, CDT1, CENPA, CENPF, CENPH, CENPI, CENPM, CENPN, CENPU, CENPW, CEP128, CEP19, CEP55, CEP78, CFC1, CFH, CFI, CFL1, CHAC1, CHAC2, CHAF1B, CHMP1B, CHP1, CHST15, CKAP2, CKS2, CLEC2D, CLIC4, CLIP4, CLK2, CLMN, CLSPN, CLSTN2, CLTA, CLTB, CMTM7, CNTNAP1, CNTNAP3, CNTNAP3B, CNTNAP3B, CNTNAP3P2, COASY, COBLL1, COG7, COL1A1, COL21A1, COL3A1, COL5A2, COLEC12, COMMD3-BM11, COPRS, COPZ1, CORIN, CORO2B, COX2, COX5A, CP, CPA4, CPD, CPSF3, CRISPLD1, CSF1, CSGALNACT1, CTBP2, CTBS, CTH, CTNND1, CTSB, CTSC, CTSL, CTSO, CUL7, CXADR, CXCL14, CXCL8, CYB5D2, CYTL1, DACT1, DBI, DBN1, DCTPP1, DDIT4, DDR2, DDX39A, DDX46, DECR1, DEDD, DEPDC1, DEPTOR, DGKD, DGKD, DGKD, DGKD, DGKD, DGKD, DHCR24, DHFR, DHRS3, DHX15, DHX9, DLGAPS, DLX1, DMKN, DOCK10, DPT, DPYD, DPYSL2, DPYSL3, DPYSL5, DSEL, DSN1, DSTN, DTNBP1, DUSP6, E2F8, EB13, EBP, EDC4, EDEM1, EDIL3, EEF1B2, EEPD1, EFEMP2, EFTUD1, EGLN3, EGR1, EID1, EIF5, EIFSA, EIF6, ELAVL2, EMP1, ENC1, ENGASE, ENO2, ENPP1, ENPP2, ENTPD4, EPAS1, EPHX1, EPT1, ERGIC1, ERH, ERN1, ERO1A, ERRFI1, ETV1, ETV5, EX01, EXT1, EXT1, EYA4, FAM101B, FAM111A, FAM111B, FAM114A1, FAM127B, FAM13A, FAM13C, FAM155A, FAM155A, FAM155A, FAM160A2, FAM161A, FAM162A, FAM200B, FAM20B, FAM214B, FAM219A, FAM234A, FAM46A, FAM83D, FANCA, FANCD2, FANCI, FBL, FBN1, FBXO32, FBXO36, FBXO44, FBXO7, FCHSD1, FDPS, FDX1L, FEMIC, FEM1C, FEN1, FGF7, FH, FIBIN, FJX1, FKBP10, FKBP1A, FKBP1A-SDCBP2, FKBP9, FLOT1, FLOT2, FLRT2, FN1, FNBP4, FOSL1, FOSL2, FOXF1, FOXF2, FOXK1, FOXM1, FRMD4B, FSCN1, FSTL1, FSTL4, FTSJ2, FUCA1, FUNDC2, FURIN, FUS, FUT11, FXYD5, FYCO1, GABRE, GALNT1, GALNT13, GANAB, GAR1, GATAD1, GBA, GBE1, GCLC, GCSH, GDI1, GFPT1, GFRA1, GFRA2, GINS1, GINS2, GLCCI1, GLI3, GLIPR2, GLIS3, GLRX2, GLT8D2, GLUL, GML, GMNN, GNAJ1, GPAA1, GPATCH2L, GPATCH4, GPI, GPNMB, GPR137C, GPR34, GPRC5B, GPT2, GRAMD1A, GRINA, GRM8, GRWD1, GTF3A, GTPBP6, GTPBP6, H2AFV, H2AFX, H2AFY2, H6PD, HDAC9, HELLS, HGF, HIBCH, HILPDA, HIST1H1B, HIST1H1C, HIST1H1D, HIST1H1E, HIST1H2AB, HIST1H2ΔG, HIST1H2AH, HIST1H2AI, HIST1H2AJ, HIST1H2AL, HIST1H2AM, HIST1H2BF, HIST1H2BG, HIST1H2BH, HIST1H2BI, HIST1H2BJ, HIST1H2BK, HIST1H2BL, HIST1H2BO, HIST1H3B, HIST1H3D, HIST1H3F, HIST1H3G, HIST1H3H, HIST1H4B, HIST1H4C, HIST1H4D, HIST1H4H, HIST1H41, HIST2H2AA3, HIST2H2AA4, HIST2H2AB, HIST2H2AC, HIST2H2BE, HIST2H2BF, HIST2H3A, HIST2H3A, HIST2H3D, HIST2H4A, HIST2H4B, HIST3H2A, HIST3H2BB, HJURP, HK2, HLTF, HMGB3, HMGCS1, HMGCS2, HNRNPM, HOXA13, HOXA3, HOXB3, HPCAL1, HS6ST2, HSD17B13, HSF4, HSP90AA1, HSPA13, HSPB3, HSPH1, HTATSF1, HTR7, ID2, ID3, IDH2, IDI1, IDO1, IER3, IFI16, IFI44L, IFITM1, IFITM2, IFITM3, IFNGR2, IGF2, IGF2BP3, IGFBP3, IGFBP5, IK, IL13RA1, IL13RA2, IL1R1, IL1RAP, IL20RB, 1L32, IL6, INAFM1, INHBB, INSIG2, IRF9, ISY1, ITFG2, ITGA11, ITGA2, ITGA3, ITGA4, ITGA5, ITGA6, ITGA8, ITGAX, ITGB3, ITGB5, ITGB6, ITGBL1, ITM2C, ITPKB, JAK2, JAK2, JUN, KAZALD1, KCNQ3, KCTD11, KDM4C, KDM5C, KEAP1, KIAA0101, KIAA1456, KIF11, KIF14, KIF15, KIF15, KIF15, KIF15, KIF15, KIF18A, KIF20A, KIF22, KIF23, KIF2C, KIF4A, KIFC1, KLF10, KLF9, KLHL4, KNSTRN, KNTC1, KPNA2, KPTN, KRT17, KRT81, KYNU, LACTB, LAMA1, LAMB1, LAMTOR4, LANCL2, LBH, LEF1, LEFTY2, LHX8, LIF, LIFR, LIMCH1, LINC00473, LINGO2, LMAN1, LMBRIL, LMNB1, LMNB2, LMNTD2, LOC100130880, LOX, LPAR6, LPCAT1, LPXN, LRIG3, LRP1, LRRC1, LRRC15, LRRC17, LRRC23, LRRC8C, LRRTM4, LRRTM4, LSAMP, LSG1, LSM3, LSM5, LUZP1, LY6E, LYPD6B, MAGEA1, MAP1LC3C, MAP2K6, MAP3K7CL, MAP9, MAPK14, MAPKIIP1L, MAPK3, MAPRE3, MARS, MASP1, MATN2, MBOAT7, MCAT, MCFD2, MCM2, MCM3, MCM4, MCM5, MCM6, MCM7, MCM8, MCOLN1, MCTP2, MDH1B, MECOM, MEF2A, MEIS2, MELK, METTL15, MFAP3L, MFSD1, MFSD10, MGAT5, MGST3, MILR1, MIR99AHG, MK167, MMAB, MMD, MMP13, MMP3, MNS1, MOCOS, MOCS2, MOGS, MORF4L2, MOSPD2, MPI, MPP7, MPPED2, MPRIP, MRPL3, MRPL51, MRPL57, MRPS11, MSANTD2, MSH2, MT1B, MT1G, MT1IP, MT1L, MT1X, MT2A, MTCH2, MTERF3, MTHFD1, MTIF2, MTPAP, MX1, MYADM, MYBL2, MYLK, MYO6, MYO6, NAGK, NALCN, NAMPT, NANOS1, NAP1L1, NAPA, NASP, NCAM1, NCAPD2, NCAPG, NCAPH, NCK1, NCKAP5, NCL, NCOA4, NCOA7, ND4L, NDC80, NDNF, NDRG1, NDUFA4L2, NDUFS6, NDUFS8, NEIL3, NETO2, NEU1, NEXN, NFAT5, NFE2, NFE21, NFKB2, NFKBIA, NFYB, NHEJ1, NHP2, NMI, NOL3, NPIPA1, NPIPA5, NPIPA7, NPIPA7, NPIPA8, NR2C1, NR2F1, NR4A1, NSDHL, NSMAF, NSUN4, NUAK1, NUSAP1, NXPH4, NYAP2, OAS1, OAS2, OASL, OCIAD2, ODC1, OGN, OGT, OLA1, OLFML2B, OLFML3, OR8B12, ORAI3, ORC1, ORC6, OSBPL3, OSGEP, OSMR, OXCT1, P4HA1, P4HA2, PABPC4, PAFAH1B3, PAK1IP1, PAN2, PAQR6, PARD3B, PARM1, PARP14, PCDH10, PCF11, PCMTD1, PCNA, PCNX, PCP4, PCYOXIL, PDE10A, PDE4B, PDE5A, PDGFD, PDGFRA, PDIA4, PDK1, PDLIM5, PELI1, PELO, PEPD, PFKFB4, PFKP, PGAM1, PGK1, PHF19, PHLDA1, PIDD1, PIF1, PIK3R3, PITPNM1, PITX1, PLA2G6, PLAC8, PLAGL1, PLAT, PLAU, PLD1, PLD1, PLEKHA2, PLEKHG1, PLEKHS1, PLIN2, PLK4, PLN, PLOD1, PLOD2, PLOD3, PLPP3, PLPP4, PLSCR1, PLXDC2, PLXNC1, PMEPA1, PMM2, PNPLA2, PNPLA6, PNRC1, PODXL, POLQ, POLR1E, POLR2J4, POLR3D, POMT1, PON2, POSTN, PPARGC1A, PPIL1, PPM1B, PPP1R37, PPP1R7, PPP1R8, PPP3CA, PQBP1, PRADC1, PRC1, PRH1, PRIM1, PRKAA2, PRKAB2, PRKAR1A, PRKDC, PRKG1, PROCR, PROZ, PRR4, PRRC2B, PRRT1, PRUNE2, PSAT1, PSD3, PSMA2, PSMB1, PSMD1, PSMD2, PSMD3, PSMD9, PSMG1, PSMG2, PTAR1, PTCHD1, PTGES, PTGES3L-AARSD1, PTGR2, PTGS2, PTPMT1, PTPN13, PTPRG, PTPRM, PTPRN2, PUS7L, PVRL2, QRICH2, RAB27A, RAB33B, RAB7B, RABEP2, RABGGTA, RAD51, RAD51AP1, RAD51C, RALGAPA2, RALGPS2, RANBP3L, RASA4, RASL11A, RBL1, RBL2, RBM3, RBM8A, RBPMS, RCN3, REC8, RECQL4, RELA, REPS1, RFC4, RFPL4A, RGL2, RGS10, RGS18, RGS2, RMI2, RNF144A, RNF145, RNF213, RNF24, RNPEP, RORA, RP11-307P5.1, RPP21, RPP30, RPP40, RPS26, RPS26, RPS6KA3, RRAGC, RRAS, RRBP1, RRM1, RRM2, RTKN2, RTN3, RUNX2, RWDD1, S100A10, SAFB2, SAMD15, SAMD5, SAMD8, SAT1, SATB2, SBNO2, SCAMP3, SCARA3, SCN9A, SCOC, SCRIB, SDC4, SEC14L2, SEC23B, SECISBP2L, SEL1L3, SEMA3C, SEMA4B, SEMA6D, SERHL2, SERINC5, SERPINA3, SETD5, SF3B1, SFR1, SFRP4, SGIP1, SGK1, SGOL2, SGSH, SH3BGRL3, SH3BP2, SHB, SHC1, SHC4, SHCBP1, SHISA5, SHMT1, SIDT2, SIGMAR1, SKA2, SLC14A1, SLC16A1, SLC16A1, SLC16A3, SLC16A4, SLC16A6, SLC1A3, SLC1A5, SLC20A1, SLC25AI9, SLC25A36, SLC25A37, SLC26A11, SLC29A1, SLC29A4, SLC2A1, SLC2A14, SLC2A3, SLC35F5, SLC37A3, SLC43A2, SLC4A4, SLC6A6, SLC7A5, SLCO4A1, SLFN5, SLIT2, SLITRK2, SLPI, SMAD7, SMAD9, SMAGP, SMC3, SMIM3, SMOX, SMPD1, SMPDL3A, SNAI1, SNAPC3, SNED1, SNRNP25, SNRPF, SNX2, SNX33, SOBP, SOCS4, SOCS5, SORT1, SOST, SPC24, SPC25, SPDL1, SPOCD1, SPON2, SPP1, SPRY1, SPRY3, SPRY3, SPRY4, SQLE, SRM, SRPX2, SRRT, SSBP2, ST8SIA4, STAG3L4, STC1, STC2, STEAP1B, STEAP2, STEAP3, STIL, STK111P, STRA6, STXBPSL, SURF4, SURF4, SURF4, SURF4, SUV39H1, SVIP, SYNC, SYNJ2, SYT14, SYTL2, TACC3, TADA3, TAF9, TAF9B, TAGLN2, TANGO6, TAPBP, TAS2R31, TBC1D1, TBC1D28, TBC1D31, TBL1X, TBXAS1, TCEAL2, TCEAL4, TCF19, TCHP, TCP1, TDO2, TEX264, TFAP2A, TFAP2C, TFPI, TFRC, TGFA, TGFB2, THTPA, TIMELESS, TIMM10, TIMP1, TIMP3, TIPARP, TM2D2, TM4SF1, TM9SF4, TMED4, TMED7-TICAM2, TMEM100, TMEM160, TMEM182, TMEM2, TMEM2, TMEM230, TMEM30A, TMEM39A, TMEM70, TMEM97, TMEM98, TMEM99, TMPO, TMSBI5A, TMUB1, TNFRSF10B, TNFRSF1A, TNFRSF9, TNFSF10, TOE1, TOMM34, TOP2A, TOR3A, TP63, TPBG, TPCN1, TPM1, TPMT, TPX2, TRAPPC2L, TRAPPC4, TRAPPC5, TRIB2, TRIB3, TRIM22, TRIM25, TRIM36, TRIM5, TRIP10, TRIP13, TRIT1, TRMO, TROAP, TSPAN9, TSR2, TSR3, TTC25, TTC37, TTLL12, TUBG2, TVP23C, TWISTNB, TXN, TXNIP, TYMS, U2AF1, UBE2C, UBR7, UGGT2, UHRF1, UMPS, UNC93B1, UNG, USP3, VAT1, VCAM1, VCAN, VGF, VOPP1, VPS11, VRK1, VWASA, WARS, WDR27, WDR34, WDR60, WDR62, WDR76, WDR90, WNT2B, WNTSB, WSB1, XBP1, XRCC2, XRCC3, XRCC6BP1, YEATS4, YIF1A, YY1AP1, ZBED6, ZBTB25, ZC4H2, ZDHHCI5, ZDHHC4, ZNF160, ZNF326, ZNF358, ZNF382, ZNF395, ZNF414, ZNF511, ZNF512B, ZNF521, ZNF529-AS1, ZNF532, ZNF570, ZNF667, ZNF682, ZNF692, ZNF777, ZNF785, ZNF830, ZNF92, ZWILCH and ZWINT.

[0322] Genes regulated more than 2-fold with a FDR<0.1 following treatment with Compound #106 full 2′oMe: AARS, ABCA1, ABLIM1, ACAT2, ACSLS, ADAM9, ADAMTS16, ADAMTSI9, ADAMTSL4, ADGRA2, ADRBK1, ADRM1, ADSSL1, AGPS, AGRN, AGT, AHNAK, AHNAK2, AHR, AJAP1, AK7, AKAP12, AKAP6, AKR1C2, AKR1C3, ALCAM, ALDH1L2, ALDH3AI, ALDOC, ALPK2, ALYREF, AMTN, ANK3, ANKRD44, ANPEP, ANTXR2, AOAH, AP4S1, APCDD1, AQP1, ARHGAP11B, ARHGDIB, ARHGEF2, ARL15, ARMC6, ARRDC3, ARRDC4, ARSG, ASPN, ATAD2, ATHL1, ATP13A2, ATP6AP1L, ATP6VIC1, ATXN1, AURKB, BANF1, BCAR3, BCAT1, BCL6, BC01, BDNF, BEX1, BLID, BMP5, BNC2, BNIP3, BSG, BST2, BTAF1, BTG2, BTG3, BUB1, BUB1B, C10orf107, C14orf1, C14orf132, C1QTNF3, C3orf14, C3orf58, C4A, C4B, C8orf4, C9orf43, C9orf50, CA12, CA9, CACNG4, CALCB, CAMK4, CARS, CASK, CASP4, CBFA2T3, CCDC102B, CCDC34, CCNA2, CCPG1, CD24, CD55, CD82, CD96, CDC45, CDC6, CDCA3, CDCA5, CDCA8, CDH6, CDK1, CEBPG, CENPF, CENPI, CENPM, CENPN, CENPU, CEP128, CFH, CFI, CHAC1, CHEK1, CHL1, CHMP1B, CHRNA1, CHRNA9, CHST15, CLDND1, CLEC2B, CLIC2, CLIC5, CLMN, CLSTN2, CMKLR1, CMTM3, CNPPD1, CNTNAP1, CNTNAP3, CNTNAP3B, CNTNAP3B, CNTNAP3P2, COBLL1, COL1A1, COL3A1, COL5A2, COLEC12, CORIN, CP, CPA4, CSF1, CSGALNACT1, CSGALNACT2, CSNK1E, CTBP1, CTBS, CTH, CTNS, CTSC, CXADR, CXCL14, CXCL3, CXCL8, CYP51A1, CYTH3, DACT1, DACT1, DBI, DBN1, DDIT4, DDX39A, DDX58, DDX60, DECR1, DEPTOR, DET1, DGKD, DGKD, DGKD, DGKD, DGKD, DHCR24, DHCR7, DHFR, DHFR, DHRS3, DHX58, DLG3, DLGAP5, DLX1, DNAH5, DNAJB1, DOCK10, DPT, DPYSL3, DSEL, DSN1, DUSP10, DUSP6, EBP, EEPD1, EFEMP2, EFTUD1, EGLN3, EID1, EIF2AK2, ELAVL2, EMP1, ENC1, ENGASE, ENO1, ENO2, ENPP2, ENTPD4, EPAS1, ERICH1, ERO1A, ERRF11, ETV1, EX01, EXT1, EXT1, F3, FAM111A, FAM111B, FAM118B, FAM13A, FAM13C, FAM155A, FAM155A, FAM161A, FAM162A, FAM198B, FAM20C, FAM46A, FAM83D, FANCI, FAP, FAS, FBLN5, FBN1, FBXO32, FGF7, FJX1, FLOT1, FN1, FOXF2, FOXM1, FSTL1, FSTL4, FUT11, GABRE, GADD45A, GATAD1, GBE1, GCLC, GDF15, GD11, GFRA1, GINS1, GINS2, GLRX, GLT8D2, GLUL, GMFG, GNAI1, GNPDA1, GPC4, GPCPD1, GPI, GPNMB, GPRC5B, GPS2, GPT2, GPX3, GRIP1, H2AFV, H2AFX, HACE1, HDAC9, HDLBP, HGF, HHAT, HIPK2, HIST1H1B, HIST1H1C, HIST1H1D, HIST1H1E, HIST1H2ΔG, HIST1H2AH, HIST1H2AI, HIST1H2AJ, HIST1H2AL, HIST1H2AM, HIST1H2BF, HIST1H2BH, HIST1H2BI, HIST1H2BJ, HIST1H2BK, HIST1H2BL, HIST1H3B, HIST1H3F, HIST1H3G, HIST1H3H, HIST1H4B, HIST1H4C, HIST1H4H, HIST2H2AA3, HIST2H2AA4, HIST2H2AB, HIST2H2AC, HIST2H2BE, HIST2H2BF, HIST2H3A, HIST2H3A, HIST2H3D, HIST2H4A, HIST2H4B, HIST3H2BB, HLA-DRA, HMCN1, HMGB3, HMGCR, HMGCS1, HMGN2, HNRNPM, HOXA3, HPCAL1, HS6ST2, HSD17B10, HSD17B13, HSF4, HSP90B1, HSPB3, HTR7, ID3, ID11, IDO1, IER3, IFI16, IFI27, IFI44, IFI44L, IFI6, IFITM1, IFITM2, IFITM3, IGF1, IGFBP3, IGFBP5, IL13RA1, IL13RA2, IL1R1, IL20RB, IL6, IL7R, ILF2, INAFM1, INHBA, INHBB, INSIG1, INSIG2, IRF9, ITGA11, ITGA2, ITGA5, ITGA6, ITGA8, ITGAX, ITGB6, ITGBL1, ITPKB, JAK2, JUN, KBTBD11, KCNH1, KCNQ3, KIAA0101, KIAA1456, KIF11, KIF15, KIF15, KIF15, KIF20A, KIF22, KIF23, KIF26B, KIF2C, KIF4A, KIFC1, KIRREL3, KPNA2, KRT17, KRTAP9-3, KYNU, LACTB, LAMB1, LBH, LEF1, LEFTY1, LEMD1, LEPR, LFNG, LGR4, LIF, LIMCH1, LINC00473, LINC00663, LINC01565, LINGO2, LITAF, LMAN1, LMNB1, LMNB2, LOX, LPAR6, LPCAT1, LRIG3, LRRC15, LRRC23, LRRN1, LRRTM4, LSAMP, LSS, LST1, LXN, LY6E, LY6E, LYPD6B, MAP1LC3C, MAP2K6, MAP3K5, MAP3K7CL, MASP1, MB21D2, MCM2, MCM3, MCM4, MCM5, MCOLN1, MCTP2, MECOM, MEIS2, MELK, MERTK, MET, MFAP2, MFAP3L, MFAP4, MFSD10, MGLL, MGP, MILR1, MIR99AHG, MKl67, MMD, MMP13, MOCOS, MPI, MPP7, MPPED2, MSC, MSH2, MT1X, MTFR2, MTHFD1, MTIF2, MX1, MX2, MYBL2, MYLK, MYO5B, MYO6, NAMPT, NANOS1, NBL1, NBN, NCAM1, NCAPD2, NCAPG, NCKAP1, NCOA7, NDC80, NDNF, NDOR1, NDUFA4L2, NES, NEXN, NFE2, NFKBIA, NKAP, NNT, NOL3, NPAS2, NPIPA1, NPIPA5, NPIPA7, NPIPA8, NQO1, NR2F1, NREP, NTM, NUAK1, NUCB2, NUDT22, NUSAP1, NXPH4, NYAP2, OAS1, OAS2, OBFC1, OLFM1, OLFML2A, OLFML2B, OLFML3, OR5H1, OSBPL3, OSGEP, OSMR, OXCT1, P2RX7, P4HA1, PABPC1, PABPC1L2A, PAD13, PADI3, PAN2, PARM1, PARP1, PARP14, PARP9, PAX9, PCDH10, PCNA, PCNX, PCP4, PDE10A, PDE5A, PDGFD, PDGFRA, PDIK1L, PDK1, PDK2, PDLIM5, PEPD, PFKFB4, PFKP, PGK1, PHLDA1, PIDD1, PIK3R3, PITX1, PKD1, PLAC8, PLAT, PLAU, PLD1, PLD1, PLIN2, PLK1, PLK4, PLOD1, PLPP3, PLPP4, PLSCR1, PLXDC2, PMEPA1, PNPLA3, POFUT2, POLD2, POLR1E, POLR2J4, POSTN, POU6F1, PPARG, PPARGCIA, PPP1CC, PRC1, PREX2, PRICKLE1, PRIM1, PRKAA2, PRKD1, PROCR, PRR11, PRSS12, PRUNE2, PSD3, PSG4, PTCH1, PTCHD1, PTGES, PTGS2, PTPN13, PTPRM, PVRL2, PXDC1, PYROXD1, RAB27A, RAB43, RACGAP1, RAD54L, RALGAPA2, RANBP3L, RAP2B, RASL11A, RASL11B, RBL2, RBM3, RBPMS, RCN3, REC8, RELB, RGS10, RGS18, RGS2, RHOJ, RNF145, RNF217, RNFT2, RORA, RPS6KA3, RRAGC, RRM1, RTKN2, RUNX2, SAMD15, SAMD8, SAT1, SATB2, SBNO2, SCSD, SDC4, SDR42E1, SECISBP2L, SEL1L3, SEMA4B, SERINC5, SERPINB1, SERPINE2, SERTAD4, SESN3, SFRP4, SGIP1, SGK1, SGOL1, SGSH, SHC1, SHC4, SHCBP1, SHISA5, SHMT1, SIDT2, SIX1, SLC14A1, SLC16A3, SLC16A4, SLC16A6, SLC1A3, SLC20A1, SLC25A37, SLC29A1, SLC29A4, SLC2AI4, SLC2A3, SLC39A8, SLC44A4, SLC4A4, SLC50A1, SLC7A5, SLC9A3R2, SLCO1C1, SLCO4A1, SLFN5, SLIT2, SLITRK2, SLPI, SMAD9, SNAI1, SNAP25, SNAPC1, SNX8, SORBS2, SORT1, SPAG4, SPC24, SPC25, SPDL1, SPECC1, SPOCD1, SPP1, SPRY1, SSBP2, ST8SIA4, STARD4, STAT1, STC1, STC2, STEAP2, STEAP3, STMN1, SULTIE1, SYNC, SYNGR1, SYNM, SYT14, TACC3, TAF9B, TBC1D2, TBC1D3L, TBL1X, TDO2, TET3, TFAP2C, TFB1M, TFPI, TFRC, TGFB2, TIMELESS, TIMP1, TIMP3, TIPARP, TK1, TLR3, TM4SF1, TMCO4, TMEM100, TMEM140, TMEM189, TMEM19, TMEM2, TMEM255A, TMEM257, TMEM97, TNC, TNFRSF10B, TNFRSF9, TNFSF10, TOB1, TOP2A, TP63, TPBG, TPM1, TPM2, TPX2, TRAPPC2L, TRIB2, TRIB3, TRIM36, TRIM49C, TSPAN2, TSPAN9, TUBAIA, TVP23C, TXK, TXNIP, TYMS, UAP1L1, UBR7, UHRF1, VASH2, VCAM1, VCAN, VEGFA, VGLL2, VWASA, WARS, WDR60, WDR62, WDR76, WFDC3, WFS1, WNT2B, WSB1, XBP1, XRCC2, YARS, YIF1A, ZBTB25, ZFP36L2, ZNF395, ZNF521, ZNF667, ZNF804A and ZNF814.

[0323] Genes regulated more than 2-fold with a FDR<0.1 following treatment with Compound #106 full 2′MOE: ACAT2, ADI1, ARRDC4, CCPG1, CDCA5, COL3A1, CP, CXCL8, EFEMP2, ENC1, FANCD2, FBN1. HIST1H1B, HIST1H2ΔG, HIST1H2AI. HIST1H2AL, HIST1H2BA, HIST1H3B, HIST2H2AA4, HIST2H2BF, HIST3H2BB, HSF4, IFI44L, IFI6, IGFBP3, KHDC1, KIF20A, LEF1, LOX, LY6E, MGAT4C, MMP3, MX1, NDNF, NDUFA4L2, NUSAP1, PDGFD, PHLDA1, PTX3, RGS18, SFRP4, TPBG and VCAN.

### Example 13

[0324] H4 neuroglioma cells seeded in 96 well plates 5000 pr well were treated with 10 μM final concentration of compounds for 5 days in 200 μL full growth medium. Progranulin expression levels were evaluated in the media after dilution 1:8 by ELISA from Abcam (ab252364) according to manufacturer's protocol. Progranulins levels were normalized to PBS treated cells and values above >1 therefore indicates an upregulation of PGRN protein levels. Table 4 list the compounds tested, their sequences and their corresponding target site on the PGRN mRNA as well as the Progranulin protein expression levels.

TABLE 4
All the antisense oligonucleotides are designed as 18-mers DNA-LNA mixmers with a phosphorothioate backbone, DNA-LNA mixmers
with a phosphorothioate backbone, LNA at the very 5′ and 3′ position and e.g. LNA for every 2^{nd} or 3^{rd} nucleotide (see Compound table).

| | | | Mature mRNA | | Precursor-mRNA | | | | Relative |
|---|---|---|---|---|---|---|---|---|---|
| | Compound | | Postion | | Position | | | | Progranulin |
| | ID (See | Oligonucleotide | (SEQ ID NO 1) | | (SEQ ID NO 3949) | | Target Site | | expression |
| | Compound | Sequence Motif | Start | End | Start | Position | Sequence | Target | (Relative |
| SEQ ID | Table) | (nucleobase Sequence) | Position | Position | Position | End | ID | Site Sequence | to PBS) |
| SEQ ID | COMP ID | TTTCTAGGGATCATGTGA | 10 | 27 | 10 | 27 | SEQ ID | TCACATGATCCCTAGAAA | 1.53 |
| 693 | 693 | | | | | | 2321 | | |
| SEQ ID | COMP ID | CATTTCTAGGGATCATGT | 12 | 29 | 12 | 29 | SEQ ID | ACATGATCCCTAGAAATG | 1.17 |
| 694 | 694 | | | | | | 2322 | | |
| SEQ ID | COMP ID | CCCATTTCTAGGGATCAT | 14 | 31 | 14 | 31 | SEQ ID | ATGATCCCTAGAAATGGG | no data |
| 695 | 695 | | | | | | 2323 | | |
| SEQ ID | COMP ID | ACCCCATTTCTAGGGATC | 16 | 33 | 16 | 33 | SEQ ID | GATCCCTAGAAATGGGGT | 1.06 |
| 696 | 696 | | | | | | 2324 | | |
| SEQ ID | COMP ID | ACACCCCATTTCTAGGGA | 18 | 35 | 18 | 35 | SEQ ID | TCCCTAGAAATGGGGTGT | no data |
| 697 | 697 | | | | | | 2325 | | |
| SEQ ID | COMP ID | CCACACCCCATTTCTAGG | 20 | 37 | 20 | 37 | SEQ ID | CCTAGAAATGGGGTGTGG | no data |
| 698 | 698 | | | | | | 2326 | | |
| SEQ ID | COMP ID | CCCCACACCCCATTTCTA | 22 | 39 | 22 | 39 | SEQ ID | TAGAAATGGGGTGTGGGG | no data |
| 699 | 699 | | | | | | 2327 | | |
| SEQ ID | COMP ID | CGCCCCACACCCCATTTC | 24 | 41 | 24 | 41 | SEQ ID | GAAATGGGGTGTGGGGCG | 1.02 |
| 700 | 700 | | | | | | 2328 | | |
| SEQ ID | COMP ID | CTCGCCCCACACCCCATT | 26 | 43 | 26 | 43 | SEQ ID | AATGGGGTGTGGGGCGAG | 1.03 |
| 701 | 701 | | | | | | 2329 | | |
| SEQ ID | COMP ID | CTCTCGCCCCACACCCCA | 28 | 45 | 28 | 45 | SEQ ID | TGGGGTGTGGGGCGAGAG | no data |
| 702 | 702 | | | | | | 2330 | | |
| SEQ ID | COMP ID | TCCTCTCGCCCCACACCC | 30 | 47 | 30 | 47 | SEQ ID | GGGTGTGGGGCGAGAGGA | 1.03 |
| 703 | 703 | | | | | | 2331 | | |
| SEQ ID | COMP ID | CTTCCTCTCGCCCCACAC | 32 | 49 | 32 | 49 | SEQ ID | GTGTGGGGCGAGAGGAAG | no data |
| 704 | 704 | | | | | | 2332 | | |
| SEQ ID | COMP ID | TGCTTCCTCTCGCCCCAC | 34 | 51 | 34 | 51 | SEQ ID | GTGGGGCGAGAGGAAGCA | 0.99 |
| 705 | 705 | | | | | | 2333 | | |
| SEQ ID | COMP ID | CCTGCTTCCTCTCGCCCC | 36 | 53 | 36 | 53 | SEQ ID | GGGGCGAGAGGAAGCAGG | 1 |
| 706 | 706 | | | | | | 2334 | | |
| SEQ ID | COMP ID | TGGCCAGGGATCAGGGCT | 139 | 156 | 139 | 156 | SEQ ID | AGCCCTGATCCCTGGCCA | 3.56 |
| 707 | 707 | | | | | | 2335 | | |
| SEQ ID | COMP ID | TTGGCCAGGGATCAGGGC | 140 | 157 | 140 | 157 | SEQ ID | GCCCTGATCCCTGGCCAA | 2.3 |
| 708 | 708 | | | | | | 2336 | | |
| SEQ ID | COMP ID | ATTGGCCAGGGATCAGGG | 141 | 158 | 141 | 158 | SEQ ID | CCCTGATCCCTGGCCAAT | 3.89 |
| 709 | 709 | | | | | | 2337 | | |
| SEQ ID | COMP ID | TGGCCAGGGATCAGGG | 141 | 156 | 141 | 156 | SEQ ID | CCCTGATCCCTGGCCA | 3.9 |
| 710 | 710 | | | | | | 2338 | | |
| SEQ ID | COMP ID | CTGCGTCCGACTCCGCGG | 232 | 249 | 232 | 249 | SEQ ID | CCGCGGAGTCGGACGCAG | 1.71 |
| 711 | 711 | | | | | | 2339 | | |
| SEQ ID | COMP ID | ACCTGCGTCCGACTCCGC | | | 234 | 251 | SEQ ID | GCGGAGTCGGACGCAGGT | 1.11 |
| 712 | 712 | | | | | | 2340 | | |
| SEQ ID | COMP ID | CTACCTGCGTCCGACTCC | | | 236 | 253 | SEQ ID | GGAGTCGGACGCAGGTAG | 1.27 |
| 713 | 713 | | | | | | 2341 | | |
| SEQ ID | COMP ID | TCCTACCTGCGTCCGACT | | | 238 | 255 | SEQ ID | AGTCGGACGCAGGTAGGA | 1.31 |
| 714 | 714 | | | | | | 2342 | | |
| SEQ ID | COMP ID | TCTCCTACCTGCGTCCGA | | | 240 | 257 | SEQ ID | TCGGACGCAGGTAGGAGA | 0.84 |
| 715 | 715 | | | | | | 2343 | | |
| SEQ ID | COMP ID | GCTCTCCTACCTGCGTCC | | | 242 | 259 | SEQ ID | GGACGCAGGTAGGAGAGC | 0.99 |
| 716 | 716 | | | | | | 2344 | | |
| SEQ ID | COMP ID | CCGCTCTCCTACCTGCGT | | | 244 | 261 | SEQ ID | ACGCAGGTAGGAGAGCGG | 1.17 |
| 717 | 717 | | | | | | 2345 | | |
| SEQ ID | COMP ID | GGCCGCTCTCCTACCTGC | | | 246 | 263 | SEQ ID | GCAGGTAGGAGAGCGGCC | 1.16 |
| 718 | 718 | | | | | | 2346 | | |
| SEQ ID | COMP ID | GCGGCCGCTCTCCTACCT | | | 248 | 265 | SEQ ID | AGGTAGGAGAGCGGCCGC | 1.38 |
| 719 | 719 | | | | | | 2347 | | |
| SEQ ID | COMP ID | GCGCGGCCGCTCTCCTAC | | | 250 | 267 | SEQ ID | GTAGGAGAGCGGCCGCGC | 1.5 |
| 720 | 720 | | | | | | 2348 | | |
| SEQ ID | COMP ID | CTGCGCGGCCGCTCTCCT | | | 252 | 269 | SEQ ID | AGGAGAGCGGCCGCGCAG | 1.5 |
| 721 | 721 | | | | | | 2349 | | |
| SEQ ID | COMP ID | GTCTGCGCGGCCGCTCTC | | | 254 | 271 | SEQ ID | GAGAGCGGCCGCGCAGAC | 1.37 |
| 722 | 722 | | | | | | 2350 | | |
| SEQ ID | COMP ID | AGGTCTGCGCGGCCGCTC | | | 256 | 273 | SEQ ID | GAGCGGCCGCGCAGACCT | 1.76 |
| 723 | 723 | | | | | | 2351 | | |
| SEQ ID | COMP ID | AGAGGTCTGCGCGGCCGC | | | 258 | 275 | SEQ ID | GCGGCCGCGCAGACCTCT | 2.24 |
| 724 | 724 | | | | | | 2352 | | |
| SEQ ID | COMP ID | CGAGAGGTCTGCGCGGCC | | | 260 | 277 | SEQ ID | GGCCGCGCAGACCTCTCG | 2.02 |
| 725 | 725 | | | | | | 2353 | | |
| SEQ ID | COMP ID | GGCGAGAGGTCTGCGCGG | | | 262 | 279 | SEQ ID | CCGCGCAGACCTCTCGCC | 3.43 |
| 726 | 726 | | | | | | 2354 | | |
| SEQ ID | COMP ID | CAGGCGAGAGGTCTGCGC | | | 264 | 281 | SEQ ID | GCGCAGACCTCTCGCCTG | 1.76 |
| 727 | 727 | | | | | | 2355 | | |
| SEQ ID | COMP ID | AGCAGGCGAGAGGTCTGC | | | 266 | 283 | SEQ ID | GCAGACCTCTCGCCTGCT | 1.47 |
| 728 | 728 | | | | | | 2356 | | |
| SEQ ID | COMP ID | GGAGCAGGCGAGAGGTCT | | | 268 | 285 | SEQ ID | AGACCTCTCGCCTGCTCC | 1.38 |
| 729 | 729 | | | | | | 2357 | | |
| SEQ ID | COMP ID | CAGGAGCAGGCGAGAGGT | | | 270 | 287 | SEQ ID | ACCTCTCGCCTGCTCCTG | 3.25 |
| 730 | 730 | | | | | | 2358 | | |
| SEQ ID | COMP ID | GGCAGGAGCAGGCGAGAG | | | 272 | 289 | SEQ ID | CTCTCGCCTGCTCCTGCC | 1.44 |
| 731 | 731 | | | | | | 2359 | | |
| SEQ ID | COMP ID | TGGGCAGGAGCAGGCGAG | | | 274 | 291 | SEQ ID | CTCGCCTGCTCCTGCCCA | 3.77 |
| 732 | 732 | | | | | | 2360 | | |
| SEQ ID | COMP ID | CCTGGGCAGGAGCAGGCG | | | 276 | 293 | SEQ ID | CGCCTGCTCCTGCCCAGG | 1.22 |
| 733 | 733 | | | | | | 2361 | | |
| SEQ ID | COMP ID | CCCCTGGGCAGGAGCAGG | | | 278 | 295 | SEQ ID | CCTGCTCCTGCCCAGGGG | 1.37 |
| 734 | 734 | | | | | | 2362 | | |
| SEQ ID | COMP ID | GGCCCCTGGGCAGGAGCA | | | 280 | 297 | SEQ ID | TGCTCCTGCCCAGGGGCC | no data |
| 735 | 735 | | | | | | 2363 | | |
| SEQ ID | COMP ID | CGGGCCCCTGGGCAGGAG | | | 282 | 299 | SEQ ID | CTCCTGCCCAGGGGCCCG | 1.77 |
| 736 | 736 | | | | | | 2364 | | |
| SEQ ID | COMP ID | GGCGGGCCCCTGGGCAGG | | | 284 | 301 | SEQ ID | CCTGCCCAGGGGCCCGCC | 1.97 |
| 737 | 737 | | | | | | 2365 | | |
| SEQ ID | COMP ID | CTGGCGGGCCCCTGGGCA | | | 286 | 303 | SEQ ID | TGCCCAGGGGCCCGCCAG | 1.64 |
| 738 | 738 | | | | | | 2366 | | |
| SEQ ID | COMP ID | CCCTGGCGGGCCCCTGGG | | | 288 | 305 | SEQ ID | CCCAGGGGCCCGCCAGGG | 2.19 |
| 739 | 739 | | | | | | 2367 | | |
| SEQ ID | COMP ID | GGCCCTGGCGGGCCCCTG | | | 290 | 307 | SEQ ID | CAGGGGCCCGCCAGGGCC | 1.3 |
| 740 | 740 | | | | | | 2368 | | |
| SEQ ID | COMP ID | ATGGCCCTGGCGGGCCCC | | | 292 | 309 | SEQ ID | GGGGCCCGCCAGGGCCAT | 2.44 |
| 741 | 741 | | | | | | 2369 | | |
| SEQ ID | COMP ID | ACATGGCCCTGGCGGGCC | | | 294 | 311 | SEQ ID | GGCCCGCCAGGGCCATGT | 1.07 |
| 742 | 742 | | | | | | 2370 | | |
| SEQ ID | COMP ID | TCACATGGCCCTGGCGGG | | | 296 | 313 | SEQ ID | CCCGCCAGGGCCATGTGA | 2.48 |
| 743 | 743 | | | | | | 2371 | | |
| SEQ ID | COMP ID | GCTCACATGGCCCTGGCG | | | 298 | 315 | SEQ ID | CGCCAGGGCCATGTGAGC | 1.48 |
| 744 | 744 | | | | | | 2372 | | |
| SEQ ID | COMP ID | AAGCTCACATGGCCCTGG | | | 300 | 317 | SEQ ID | CCAGGGCCATGTGAGCTT | 1.52 |
| 745 | 745 | | | | | | 2373 | | |
| SEQ ID | COMP ID | TCAAGCTCACATGGCCCT | | | 302 | 319 | SEQ ID | AGGGCCATGTGAGCTTGA | 1.16 |
| 746 | 746 | | | | | | 2374 | | |
| SEQ ID | COMP ID | CTCAAGCTCACATGGCCC | | | 303 | 320 | SEQ ID | GGGCCATGTGAGCTTGAG | 1.54 |
| 747 | 747 | | | | | | 2375 | | |
| SEQ ID | COMP ID | CCTCAAGCTCACATGGCC | | | 304 | 321 | SEQ ID | GGCCATGTGAGCTTGAGG | 1.28 |
| 748 | 748 | | | | | | 2376 | | |
| SEQ ID | COMP ID | CTCAAGCTCACATGGC | | | 305 | 320 | SEQ ID | GCCATGTGAGCTTGAG | 1.36 |
| 749 | 749 | | | | | | 2377 | | |
| SEQ ID | COMP ID | ACCTCAAGCTCACATGGC | | | 305 | 322 | SEQ ID | GCCATGTGAGCTTGAGGT | 1.38 |
| 750 | 750 | | | | | | 2378 | | |
| SEQ ID | COMP ID | AACCTCAAGCTCACATGG | | | 306 | 323 | SEQ ID | CCATGTGAGCTTGAGGTT | 1.01 |
| 751 | 751 | | | | | | 2379 | | |
| SEQ ID | COMP ID | GGAACCTCAAGCTCACAT | | | 308 | 325 | SEQ ID | ATGTGAGCTTGAGGTTCC | 1.16 |
| 752 | 752 | | | | | | 2380 | | |
| SEQ ID | COMP ID | GGGGAACCTCAAGCTCAC | | | 310 | 327 | SEQ ID | GTGAGCTTGAGGTTCCCC | 1.1 |
| 753 | 753 | | | | | | 2381 | | |
| SEQ ID | COMP ID | CAGGGGAACCTCAAGCTC | | | 312 | 329 | SEQ ID | GAGCTTGAGGTTCCCCTG | 0.89 |
| 754 | 754 | | | | | | 2382 | | |
| SEQ ID | COMP ID | TCCAGGGGAACCTCAAGC | | | 314 | 331 | SEQ ID | GCTTGAGGTTCCCCTGGA | 0.74 |
| 755 | 755 | | | | | | 2383 | | |
| SEQ ID | COMP ID | ACTCCAGGGGAACCTCAA | | | 316 | 333 | SEQ ID | TTGAGGTTCCCCTGGAGT | 1.03 |
| 756 | 756 | | | | | | 2384 | | |
| SEQ ID | COMP ID | AGACTCCAGGGGAACCTC | | | 318 | 335 | SEQ ID | GAGGTTCCCCTGGAGTCT | 0.94 |
| 757 | 757 | | | | | | 2385 | | |
| SEQ ID | COMP ID | TGAGACTCCAGGGGAACC | | | 320 | 337 | SEQ ID | GGTTCCCCTGGAGTCTCA | 1.61 |
| 758 | 758 | | | | | | 2386 | | |
| SEQ ID | COMP ID | GCTGAGACTCCAGGGGAA | | | 322 | 339 | SEQ ID | TTCCCCTGGAGTCTCAGC | 3.32 |
| 759 | 759 | | | | | | 2387 | | |
| SEQ ID | COMP ID | CGGCTGAGACTCCAGGGG | | | 324 | 341 | SEQ ID | CCCCTGGAGTCTCAGCCG | 3.72 |
| 760 | 760 | | | | | | 2388 | | |
| SEQ ID | COMP ID | TCCGGCTGAGACTCCAGG | | | 326 | 343 | SEQ ID | CCTGGAGTCTCAGCCGGA | 1.61 |
| 761 | 761 | | | | | | 2389 | | |
| SEQ ID | COMP ID | TCTCCGGCTGAGACTCCA | | | 328 | 345 | SEQ ID | TGGAGTCTCAGCCGGAGA | 1.27 |
| 762 | 762 | | | | | | 2390 | | |
| SEQ ID | COMP ID | TGTCTCCGGCTGAGACTC | | | 330 | 347 | SEQ ID | GAGTCTCAGCCGGAGACA | no data |
| 763 | 763 | | | | | | 2391 | | |
| SEQ ID | COMP ID | GTTGTCTCCGGCTGAGAC | | | 332 | 349 | SEQ ID | GTCTCAGCCGGAGACAAC | 1.35 |
| 764 | 764 | | | | | | 2392 | | |
| SEQ ID | COMP ID | CTGTTGTCTCCGGCTGAG | | | 334 | 351 | SEQ ID | CTCAGCCGGAGACAACAG | 1.43 |
| 765 | 765 | | | | | | 2393 | | |
| SEQ ID | COMP ID | TTCTGTTGTCTCCGGCTG | | | 336 | 353 | SEQ ID | CAGCCGGAGACAACAGAA | 1.5 |
| 766 | 766 | | | | | | 2394 | | |
| SEQ ID | COMP ID | TCTTCTGTTGTCTCCGGC | | | 338 | 355 | SEQ ID | GCCGGAGACAACAGAAGA | 1.08 |
| 767 | 767 | | | | | | 2395 | | |
| SEQ ID | COMP ID | GTTCTTCTGTTGTCTCCG | | | 340 | 357 | SEQ ID | CGGAGACAACAGAAGAAC | 1.11 |
| 768 | 768 | | | | | | 2396 | | |
| SEQ ID | COMP ID | CGGTTCTTCTGTTGTCTC | | | 342 | 359 | SEQ ID | GAGACAACAGAAGAACCG | 1.23 |
| 769 | 769 | | | | | | 2397 | | |
| SEQ ID | COMP ID | AGCGGTTCTTCTGTTGTC | | | 344 | 361 | SEQ ID | GACAACAGAAGAACCGCT | 1.44 |
| 770 | 770 | | | | | | 2398 | | |
| SEQ ID | COMP ID | TAAGCGGTTCTTCTGTTG | | | 346 | 363 | SEQ ID | CAACAGAAGAACCGCTTA | 1.43 |
| 771 | 771 | | | | | | 2399 | | |
| SEQ ID | COMP ID | AGTAAGCGGTTCTTCTGT | | | 348 | 365 | SEQ ID | ACAGAAGAACCGCTTACT | 1.33 |
| 772 | 772 | | | | | | 2400 | | |
| SEQ ID | COMP ID | TCAGTAAGCGGTTCTTCT | | | 350 | 367 | SEQ ID | AGAAGAACCGCTTACTGA | 1.16 |
| 773 | 773 | | | | | | 2401 | | |
| SEQ ID | COMP ID | TTTCAGTAAGCGGTTCTT | | | 352 | 369 | SEQ ID | AAGAACCGCTTACTGAAA | 0.96 |
| 774 | 774 | | | | | | 2402 | | |
| SEQ ID | COMP ID | AGTTTCAGTAAGCGGTTC | | | 354 | 371 | SEQ ID | GAACCGCTTACTGAAACT | 1.5 |
| 775 | 775 | | | | | | 2403 | | |
| SEQ ID | COMP ID | GGAGTTTCAGTAAGCGGT | | | 356 | 373 | SEQ ID | ACCGCTTACTGAAACTCC | 1.46 |
| 776 | 776 | | | | | | 2404 | | |
| SEQ ID | COMP ID | AAGGAGTTTCAGTAAGCG | | | 358 | 375 | SEQ ID | CGCTTACTGAAACTCCTT | 1.38 |
| 777 | 777 | | | | | | 2405 | | |
| SEQ ID | COMP ID | CCAAGGAGTTTCAGTAAG | | | 360 | 377 | SEQ ID | CTTACTGAAACTCCTTGG | 1.29 |
| 778 | 778 | | | | | | 2406 | | |
| SEQ ID | COMP ID | CCCCAAGGAGTTTCAGTA | | | 362 | 379 | SEQ ID | TACTGAAACTCCTTGGGG | 1.37 |
| 779 | 779 | | | | | | 2407 | | |
| SEQ ID | COMP ID | ACCCCCAAGGAGTTTCAG | | | 364 | 381 | SEQ ID | CTGAAACTCCTTGGGGGT | 1 |
| 780 | 780 | | | | | | 2408 | | |
| SEQ ID | COMP ID | GAACCCCCAAGGAGTTTC | | | 366 | 383 | SEQ ID | GAAACTCCTTGGGGGTTC | 0.89 |
| 781 | 781 | | | | | | 2409 | | |
| SEQ ID | COMP ID | CAGAACCCCCAAGGAGTT | | | 368 | 385 | SEQ ID | AACTCCTTGGGGGTTCTG | 1.22 |
| 782 | 782 | | | | | | 2410 | | |
| SEQ ID | COMP ID | ATCAGAACCCCCAAGGAG | | | 370 | 387 | SEQ ID | CTCCTTGGGGGTTCTGAT | 1.07 |
| 783 | 783 | | | | | | 2411 | | |
| SEQ ID | COMP ID | GTATCAGAACCCCCAAGG | | | 372 | 389 | SEQ ID | CCTTGGGGGTTCTGATAC | 0.9 |
| 784 | 784 | | | | | | 2412 | | |
| SEQ ID | COMP ID | GTGTATCAGAACCCCCAA | | | 374 | 391 | SEQ ID | TTGGGGGTTCTGATACAC | 1.05 |
| 785 | 785 | | | | | | 2413 | | |
| SEQ ID | COMP ID | TAGTGTATCAGAACCCCC | | | 376 | 393 | SEQ ID | GGGGGTTCTGATACACTA | 1.02 |
| 786 | 786 | | | | | | 2414 | | |
| SEQ ID | COMP ID | CCTAGTGTATCAGAACCC | | | 378 | 395 | SEQ ID | GGGTTCTGATACACTAGG | 1.17 |
| 787 | 787 | | | | | | 2415 | | |
| SEQ ID | COMP ID | CCCCTAGTGTATCAGAAC | | | 380 | 397 | SEQ ID | GTTCTGATACACTAGGGG | 1.2 |
| 788 | 788 | | | | | | 2416 | | |
| SEQ ID | COMP ID | TCCCCCTAGTGTATCAGA | | | 382 | 399 | SEQ ID | TCTGATACACTAGGGGGA | 0.94 |
| 789 | 789 | | | | | | 2417 | | |
| SEQ ID | COMP ID | ACTCCCCCTAGTGTATCA | | | 384 | 401 | SEQ ID | TGATACACTAGGGGGAGT | 1.08 |
| 790 | 790 | | | | | | 2418 | | |
| SEQ ID | COMP ID | AAACTCCCCCTAGTGTAT | | | 386 | 403 | SEQ ID | ATACACTAGGGGGAGTTT | 1 |
| 791 | 791 | | | | | | 2419 | | |
| SEQ ID | COMP ID | TAAAACTCCCCCTAGTGT | | | 388 | 405 | SEQ ID | ACACTAGGGGGAGTTTTA | 0.64 |
| 792 | 792 | | | | | | 2420 | | |
| SEQ ID | COMP ID | CATAAAACTCCCCCTAGT | | | 390 | 407 | SEQ ID | ACTAGGGGGAGTTTTATG | 1.26 |
| 793 | 793 | | | | | | 2421 | | |
| SEQ ID | COMP ID | CCCATAAAACTCCCCCTA | | | 392 | 409 | SEQ ID | TAGGGGGAGTTTTATGGG | 0.8 |
| 794 | 794 | | | | | | 2422 | | |
| SEQ ID | COMP ID | TTCCCATAAAACTCCCCC | | | 394 | 411 | SEQ ID | GGGGGAGTTTTATGGGAA | 0.99 |
| 795 | 795 | | | | | | 2423 | | |
| SEQ ID | COMP ID | CTTTCCCATAAAACTCCC | | | 396 | 413 | SEQ ID | GGGAGTTTTATGGGAAAG | 1.31 |
| 796 | 796 | | | | | | 2424 | | |
| SEQ ID | COMP ID | CTCTTTCCCATAAAACTC | | | 398 | 415 | SEQ ID | GAGTTTTATGGGAAAGAG | 1.44 |
| 797 | 797 | | | | | | 2425 | | |
| SEQ ID | COMP ID | TCCTCTTTCCCATAAAAC | | | 400 | 417 | SEQ ID | GTTTTATGGGAAAGAGGA | 1.89 |
| 798 | 798 | | | | | | 2426 | | |
| SEQ ID | COMP ID | CTTCCTCTTTCCCATAAA | | | 402 | 419 | SEQ ID | TTTATGGGAAAGAGGAAG | 1.25 |
| 799 | 799 | | | | | | 2427 | | |
| SEQ ID | COMP ID | TGCTTCCTCTTTCCCATA | | | 404 | 421 | SEQ ID | TATGGGAAAGAGGAAGCA | 3.2 |
| 800 | 800 | | | | | | 2428 | | |
| SEQ ID | COMP ID | ACTGCTTCCTCTTTCCCA | | | 406 | 423 | SEQ ID | TGGGAAAGAGGAAGCAGT | 1.68 |
| 801 | 801 | | | | | | 2429 | | |
| SEQ ID | COMP ID | TTACTGCTTCCTCTTTCC | | | 408 | 425 | SEQ ID | GGAAAGAGGAAGCAGTAA | 1.7 |
| 802 | 802 | | | | | | 2430 | | |
| SEQ ID | COMP ID | AATTACTGCTTCCTCTTT | | | 410 | 427 | SEQ ID | AAAGAGGAAGCAGTAATT | 2.78 |
| 803 | 803 | | | | | | 2431 | | |
| SEQ ID | COMP ID | GCAATTACTGCTTCCTCT | | | 412 | 429 | SEQ ID | AGAGGAAGCAGTAATTGC | 3.72 |
| 804 | 804 | | | | | | 2432 | | |
| SEQ ID | COMP ID | CTGCAATTACTGCTTCCT | | | 414 | 431 | SEQ ID | AGGAAGCAGTAATTGCAG | 1.17 |
| 805 | 805 | | | | | | 2433 | | |
| SEQ ID | COMP ID | CACTGCAATTACTGCTTC | | | 416 | 433 | SEQ ID | GAAGCAGTAATTGCAGTG | 1.22 |
| 806 | 806 | | | | | | 2434 | | |
| SEQ ID | COMP ID | GTCACTGCAATTACTGCT | | | 418 | 435 | SEQ ID | AGCAGTAATTGCAGTGAC | 1.87 |
| 807 | 807 | | | | | | 2435 | | |
| SEQ ID | COMP ID | GCGTCACTGCAATTACTG | | | 420 | 437 | SEQ ID | CAGTAATTGCAGTGACGC | 1.03 |
| 808 | 808 | | | | | | 2436 | | |
| SEQ ID | COMP ID | GGGCGTCACTGCAATTAC | | | 422 | 439 | SEQ ID | GTAATTGCAGTGACGCCC | 1.46 |
| 809 | 809 | | | | | | 2437 | | |
| SEQ ID | COMP ID | CGGGGCGTCACTGCAATT | | | 424 | 441 | SEQ ID | AATTGCAGTGACGCCCCG | 1.2 |
| 810 | 810 | | | | | | 2438 | | |
| SEQ ID | COMP ID | AACGGGGCGTCACTGCAA | | | 426 | 443 | SEQ ID | TTGCAGTGACGCCCCGTT | 1.39 |
| 811 | 811 | | | | | | 2439 | | |
| SEQ ID | COMP ID | CTAACGGGGCGTCACTGC | | | 428 | 445 | SEQ ID | GCAGTGACGCCCCGTTAG | 3.79 |
| 812 | 812 | | | | | | 2440 | | |
| SEQ ID | COMP ID | TTCTAACGGGGCGTCACT | | | 430 | 447 | SEQ ID | AGTGACGCCCCGTTAGAA | 1.79 |
| 813 | 813 | | | | | | 2441 | | |
| SEQ ID | COMP ID | CCTTCTAACGGGGCGTCA | | | 432 | 449 | SEQ ID | TGACGCCCCGTTAGAAGG | 1.76 |
| 814 | 814 | | | | | | 2442 | | |
| SEQ ID | COMP ID | CCCCTTCTAACGGGGCGT | | | 434 | 451 | SEQ ID | ACGCCCCGTTAGAAGGGG | 1.36 |
| 815 | 815 | | | | | | 2443 | | |
| SEQ ID | COMP ID | AGCCCCTTCTAACGGGGC | | | 436 | 453 | SEQ ID | GCCCCGTTAGAAGGGGCT | 3.19 |
| 816 | 816 | | | | | | 2444 | | |
| SEQ ID | COMP ID | AAAGCCCCTTCTAACGGG | | | 438 | 455 | SEQ ID | CCCGTTAGAAGGGGCTTT | 1.06 |
| 817 | 817 | | | | | | 2445 | | |
| SEQ ID | COMP ID | AGAAAGCCCCTTCTAACG | | | 440 | 457 | SEQ ID | CGTTAGAAGGGGCTTTCT | 1.6 |
| 818 | 818 | | | | | | 2446 | | |
| SEQ ID | COMP ID | GTAGAAAGCCCCTTCTAA | | | 442 | 459 | SEQ ID | TTAGAAGGGGCTTTCTAC | 2.25 |
| 819 | 819 | | | | | | 2447 | | |
| SEQ ID | COMP ID | AGGTAGAAAGCCCCTTCT | | | 444 | 461 | SEQ ID | AGAAGGGGCTTTCTACCT | 1.29 |
| 820 | 820 | | | | | | 2448 | | |
| SEQ ID | COMP ID | GGAGGTAGAAAGCCCCTT | | | 446 | 463 | SEQ ID | AAGGGGCTTTCTACCTCC | 1.43 |
| 821 | 821 | | | | | | 2449 | | |
| SEQ ID | COMP ID | GGGGAGGTAGAAAGCCCC | | | 448 | 465 | SEQ ID | GGGGCTTTCTACCTCCCC | 1.64 |
| 822 | 822 | | | | | | 2450 | | |
| SEQ ID | COMP ID | CTGGGGAGGTAGAAAGCC | | | 450 | 467 | SEQ ID | GGCTTTCTACCTCCCCAG | 2.6 |
| 823 | 823 | | | | | | 2451 | | |
| SEQ ID | COMP ID | TGCTGGGGAGGTAGAAAG | | | 452 | 469 | SEQ ID | CTTTCTACCTCCCCAGCA | 3.42 |
| 824 | 824 | | | | | | 2452 | | |
| SEQ ID | COMP ID | AATGCTGGGGAGGTAGAA | | | 454 | 471 | SEQ ID | TTCTACCTCCCCAGCATT | 2.21 |
| 825 | 825 | | | | | | 2453 | | |
| SEQ ID | COMP ID | GGAATGCTGGGGAGGTAG | | | 456 | 473 | SEQ ID | CTACCTCCCCAGCATTCC | 2.43 |
| 826 | 826 | | | | | | 2454 | | |
| SEQ ID | COMP ID | GGGGAATGCTGGGGAGGT | | | 458 | 475 | SEQ ID | ACCTCCCCAGCATTCCCC | 1.6 |
| 827 | 827 | | | | | | 2455 | | |
| SEQ ID | COMP ID | TGGGGGAATGCTGGGGAG | | | 460 | 477 | SEQ ID | CTCCCCAGCATTCCCCCA | 3.44 |
| 828 | 828 | | | | | | 2456 | | |
| SEQ ID | COMP ID | TTTGGGGGAATGCTGGGG | | | 462 | 479 | SEQ ID | CCCCAGCATTCCCCCAAA | 1.07 |
| 829 | 829 | | | | | | 2457 | | |
| SEQ ID | COMP ID | GCTTTGGGGGAATGCTGG | | | 464 | 481 | SEQ ID | CCAGCATTCCCCCAAAGC | 2.17 |
| 830 | 830 | | | | | | 2458 | | |
| SEQ ID | COMP ID | CTGCTTTGGGGGAATGCT | | | 466 | 483 | SEQ ID | AGCATTCCCCCAAAGCAG | 1.98 |
| 831 | 831 | | | | | | 2459 | | |
| SEQ ID | COMP ID | CCCTGCTTTGGGGGAATG | | | 468 | 485 | SEQ ID | CATTCCCCCAAAGCAGGG | 1.31 |
| 832 | 832 | | | | | | 2460 | | |
| SEQ ID | COMP ID | GTCCCTGCTTTGGGGGAA | | | 470 | 487 | SEQ ID | TTCCCCCAAAGCAGGGAC | 1.51 |
| 833 | 833 | | | | | | 2461 | | |
| SEQ ID | COMP ID | TGGTCCCTGCTTTGGGGG | | | 472 | 489 | SEQ ID | CCCCCAAAGCAGGGACCA | 1.4 |
| 834 | 834 | | | | | | 2462 | | |
| SEQ ID | COMP ID | TGTGGTCCCTGCTTTGGG | | | 474 | 491 | SEQ ID | CCCAAAGCAGGGACCACA | 3.59 |
| 835 | 835 | | | | | | 2463 | | |
| SEQ ID | COMP ID | GGTGTGGTCCCTGCTTTG | | | 476 | 493 | SEQ ID | CAAAGCAGGGACCACACC | 3.28 |
| 836 | 836 | | | | | | 2464 | | |
| SEQ ID | COMP ID | ATGGTGTGGTCCCTGCTT | | | 478 | 495 | SEQ ID | AAGCAGGGACCACACCAT | 2.45 |
| 837 | 837 | | | | | | 2465 | | |
| SEQ ID | COMP ID | GAATGGTGTGGTCCCTGC | | | 480 | 497 | SEQ ID | GCAGGGACCACACCATTC | 2.59 |
| 838 | 838 | | | | | | 2466 | | |
| SEQ ID | COMP ID | AGAATGGTGTGGTCCCTG | | | 481 | 498 | SEQ ID | CAGGGACCACACCATTCT | 2.2 |
| 839 | 839 | | | | | | 2467 | | |
| SEQ ID | COMP ID | GAATGGTGTGGTCCCT | | | 482 | 497 | SEQ ID | AGGGACCACACCATTC | 2.02 |
| 840 | 840 | | | | | | 2468 | | |
| SEQ ID | COMP ID | AAGAATGGTGTGGTCCCT | | | 482 | 499 | SEQ ID | AGGGACCACACCATTCTT | 1.64 |
| 841 | 841 | | | | | | 2469 | | |
| SEQ ID | COMP ID | CAAGAATGGTGTGGTCCC | | | 483 | 500 | SEQ ID | GGGACCACACCATTCTTG | 1.99 |
| 842 | 842 | | | | | | 2470 | | |
| SEQ ID | COMP ID | TCAAGAATGGTGTGGTCC | | | 484 | 501 | SEQ ID | GGACCACACCATTCTTGA | 2.61 |
| 843 | 843 | | | | | | 2471 | | |
| SEQ ID | COMP ID | CAAGAATGGTGTGGTC | | | 485 | 500 | SEQ ID | GACCACACCATTCTTG | 2.61 |
| 844 | 844 | | | | | | 2472 | | |
| SEQ ID | COMP ID | GTCAAGAATGGTGTGGTC | | | 485 | 502 | SEQ ID | GACCACACCATTCTTGAC | 2.79 |
| 845 | 845 | | | | | | 2473 | | |
| SEQ ID | COMP ID | GGTCAAGAATGGTGTGGT | | | 486 | 503 | SEQ ID | ACCACACCATTCTTGACC | 1.99 |
| 846 | 846 | | | | | | 2474 | | |
| SEQ ID | COMP ID | GGGTCAAGAATGGTGTGG | | | 487 | 504 | SEQ ID | CCACACCATTCTTGACCC | 3.09 |
| 847 | 847 | | | | | | 2475 | | |
| SEQ ID | COMP ID | GGTCAAGAATGGTGTG | | | 488 | 503 | SEQ ID | CACACCATTCTTGACC | 1.65 |
| 848 | 848 | | | | | | 2476 | | |
| SEQ ID | COMP ID | TGGGTCAAGAATGGTGTG | | | 488 | 505 | SEQ ID | CACACCATTCTTGACCCA | 2.16 |
| 849 | 849 | | | | | | 2477 | | |
| SEQ ID | COMP ID | GCTGGGTCAAGAATGGTG | | | 490 | 507 | SEQ ID | CACCATTCTTGACCCAGC | 1.94 |
| 850 | 850 | | | | | | 2478 | | |
| SEQ ID | COMP ID | GAGCTGGGTCAAGAATGG | | | 492 | 509 | SEQ ID | CCATTCTTGACCCAGCTC | 1.28 |
| 851 | 851 | | | | | | 2479 | | |
| SEQ ID | COMP ID | TGGAGCTGGGTCAAGAAT | | | 494 | 511 | SEQ ID | ATTCTTGACCCAGCTCCA | 0.97 |
| 852 | 852 | | | | | | 2480 | | |
| SEQ ID | COMP ID | GGTGGAGCTGGGTCAAGA | | | 496 | 513 | SEQ ID | TCTTGACCCAGCTCCACC | 1.37 |
| 853 | 853 | | | | | | 2481 | | |
| SEQ ID | COMP ID | GGGGTGGAGCTGGGTCAA | | | 498 | 515 | SEQ ID | TTGACCCAGCTCCACCCC | 3.35 |
| 854 | 854 | | | | | | 2482 | | |
| SEQ ID | COMP ID | CAGGGGTGGAGCTGGGTC | | | 500 | 517 | SEQ ID | GACCCAGCTCCACCCCTG | 2.53 |
| 855 | 855 | | | | | | 2483 | | |
| SEQ ID | COMP ID | GACAGGGGTGGAGCTGGG | | | 502 | 519 | SEQ ID | CCCAGCTCCACCCCTGTC | 1.83 |
| 856 | 856 | | | | | | 2484 | | |
| SEQ ID | COMP ID | CCGACAGGGGTGGAGCTG | | | 504 | 521 | SEQ ID | CAGCTCCACCCCTGTCGG | 3.06 |
| 857 | 857 | | | | | | 2485 | | |
| SEQ ID | COMP ID | TACCGACAGGGGTGGAGC | | | 506 | 523 | SEQ ID | GCTCCACCCCTGTCGGTA | 0.99 |
| 858 | 858 | | | | | | 2486 | | |
| SEQ ID | COMP ID | CCTACCGACAGGGGTGGA | | | 508 | 525 | SEQ ID | TCCACCCCTGTCGGTAGG | 2.78 |
| 859 | 859 | | | | | | 2487 | | |
| SEQ ID | COMP ID | CACCTACCGACAGGGGTG | | | 510 | 527 | SEQ ID | CACCCCTGTCGGTAGGTG | 0.99 |
| 860 | 860 | | | | | | 2488 | | |
| SEQ ID | COMP ID | AGCACCTACCGACAGGGG | | | 512 | 529 | SEQ ID | CCCCTGTCGGTAGGTGCT | 1.89 |
| 861 | 861 | | | | | | 2489 | | |
| SEQ ID | COMP ID | CCAGCACCTACCGACAGG | | | 514 | 531 | SEQ ID | CCTGTCGGTAGGTGCTGG | 1.45 |
| 862 | 862 | | | | | | 2490 | | |
| SEQ ID | COMP ID | AGCCAGCACCTACCGACA | | | 516 | 533 | SEQ ID | TGTCGGTAGGTGCTGGCT | 1.36 |
| 863 | 863 | | | | | | 2491 | | |
| SEQ ID | COMP ID | GAAGCCAGCACCTACCGA | | | 518 | 535 | SEQ ID | TCGGTAGGTGCTGGCTTC | 1.44 |
| 864 | 864 | | | | | | 2492 | | |
| SEQ ID | COMP ID | AAGAAGCCAGCACCTACC | | | 520 | 537 | SEQ ID | GGTAGGTGCTGGCTTCTT | 1.37 |
| 865 | 865 | | | | | | 2493 | | |
| SEQ ID | COMP ID | GGAAGAAGCCAGCACCTA | | | 522 | 539 | SEQ ID | TAGGTGCTGGCTTCTTCC | 3.34 |
| 866 | 866 | | | | | | 2494 | | |
| SEQ ID | COMP ID | GGGGAAGAAGCCAGCACC | | | 524 | 541 | SEQ ID | GGTGCTGGCTTCTTCCCC | 2.17 |
| 867 | 867 | | | | | | 2495 | | |
| SEQ ID | COMP ID | GAGGGGAAGAAGCCAGCA | | | 526 | 543 | SEQ ID | TGCTGGCTTCTTCCCCTC | 3.05 |
| 868 | 868 | | | | | | 2496 | | |
| SEQ ID | COMP ID | GAGAGGGGAAGAAGCCAG | | | 528 | 545 | SEQ ID | CTGGCTTCTTCCCCTCTC | 4.04 |
| 869 | 869 | | | | | | 2497 | | |
| SEQ ID | COMP ID | AGGAGAGGGGAAGAAGCC | | | 530 | 547 | SEQ ID | GGCTTCTTCCCCTCTCCT | 1.08 |
| 870 | 870 | | | | | | 2498 | | |
| SEQ ID | COMP ID | CCAGGAGAGGGGAAGAAG | | | 532 | 549 | SEQ ID | CTTCTTCCCCTCTCCTGG | 2.49 |
| 871 | 871 | | | | | | 2499 | | |
| SEQ ID | COMP ID | CACCAGGAGAGGGGAAGA | | | 534 | 551 | SEQ ID | TCTTCCCCTCTCCTGGTG | 0.99 |
| 872 | 872 | | | | | | 2500 | | |
| SEQ ID | COMP ID | ACCACCAGGAGAGGGGAA | | | 536 | 553 | SEQ ID | TTCCCCTCTCCTGGTGGT | 1.81 |
| 873 | 873 | | | | | | 2501 | | |
| SEQ ID | COMP ID | CCACCACCAGGAGAGGGG | | | 538 | 555 | SEQ ID | CCCCTCTCCTGGTGGTGG | 1.65 |
| 874 | 874 | | | | | | 2502 | | |
| SEQ ID | COMP ID | CACCACCACCAGGAGAGG | | | 540 | 557 | SEQ ID | CCTCTCCTGGTGGTGGTG | 1.2 |
| 875 | 875 | | | | | | 2503 | | |
| SEQ ID | COMP ID | CCCACCACCACCAGGAGA | | | 542 | 559 | SEQ ID | TCTCCTGGTGGTGGTGGG | 1.69 |
| 876 | 876 | | | | | | 2504 | | |
| SEQ ID | COMP ID | CACCCACCACCACCAGGA | | | 544 | 561 | SEQ ID | TCCTGGTGGTGGTGGGTG | 1.16 |
| 877 | 877 | | | | | | 2505 | | |
| SEQ ID | COMP ID | ACCACCCACCACCACCAG | | | 546 | 563 | SEQ ID | CTGGTGGTGGTGGGTGGT | 3.65 |
| 878 | 878 | | | | | | 2506 | | |
| SEQ ID | COMP ID | GAACCACCCACCACCACC | | | 548 | 565 | SEQ ID | GGTGGTGGTGGGTGGTTC | 2.58 |
| 879 | 879 | | | | | | 2507 | | |
| SEQ ID | COMP ID | GGGAACCACCCACCACCA | | | 550 | 567 | SEQ ID | TGGTGGTGGGTGGTTCCC | 2.19 |
| 880 | 880 | | | | | | 2508 | | |
| SEQ ID | COMP ID | GCGGGAACCACCCACCAC | | | 552 | 569 | SEQ ID | GTGGTGGGTGGTTCCCGC | 2.9 |
| 881 | 881 | | | | | | 2509 | | |
| SEQ ID | COMP ID | CCTCCTGTTTACCCTAAA | | | 999 | 1016 | SEQ ID | TTTAGGGTAAACAGGAGG | 1.02 |
| 882 | 882 | | | | | | 2510 | | |
| SEQ ID | COMP ID | CCCCTCCTGTTTACCCTA | | | 1001 | 1018 | SEQ ID | TAGGGTAAACAGGAGGGG | 2.58 |
| 883 | 883 | | | | | | 2511 | | |
| SEQ ID | COMP ID | GGCCCCTCCTGTTTACCC | | | 1003 | 1020 | SEQ ID | GGGTAAACAGGAGGGGCC | 1.09 |
| 884 | 884 | | | | | | 2512 | | |
| SEQ ID | COMP ID | GTGGCCCCTCCTGTTTAC | | | 1005 | 1022 | SEQ ID | GTAAACAGGAGGGGCCAC | 2.42 |
| 885 | 885 | | | | | | 2513 | | |
| SEQ ID | COMP ID | ATGTGGCCCCTCCTGTTT | | | 1007 | 1024 | SEQ ID | AAACAGGAGGGGCCACAT | 1.39 |
| 886 | 886 | | | | | | 2514 | | |
| SEQ ID | COMP ID | GCATGTGGCCCCTCCTGT | | | 1009 | 1026 | SEQ ID | ACAGGAGGGGCCACATGC | 1.64 |
| 887 | 887 | | | | | | 2515 | | |
| SEQ ID | COMP ID | GTGCATGTGGCCCCTCCT | | | 1011 | 1028 | SEQ ID | AGGAGGGGCCACATGCAC | 1.97 |
| 888 | 888 | | | | | | 2516 | | |
| SEQ ID | COMP ID | CTGTGCATGTGGCCCCTC | | | 1013 | 1030 | SEQ ID | GAGGGGCCACATGCACAG | 0.96 |
| 889 | 889 | | | | | | 2517 | | |
| SEQ ID | COMP ID | ACCTGTGCATGTGGCCCC | | | 1015 | 1032 | SEQ ID | GGGGCCACATGCACAGGT | 4.64 |
| 890 | 890 | | | | | | 2518 | | |
| SEQ ID | COMP ID | TTACCTGTGCATGTGGCC | | | 1017 | 1034 | SEQ ID | GGCCACATGCACAGGTAA | 1.75 |
| 891 | 891 | | | | | | 2519 | | |
| SEQ ID | COMP ID | AATTACCTGTGCATGTGG | | | 1019 | 1036 | SEQ ID | CCACATGCACAGGTAATT | 1.65 |
| 892 | 892 | | | | | | 2520 | | |
| SEQ ID | COMP ID | TGAATTACCTGTGCATGT | | | 1021 | 1038 | SEQ ID | ACATGCACAGGTAATTCA | 2.75 |
| 893 | 893 | | | | | | 2521 | | |
| SEQ ID | COMP ID | GGTGAATTACCTGTGCAT | | | 1023 | 1040 | SEQ ID | ATGCACAGGTAATTCACC | 1.08 |
| 894 | 894 | | | | | | 2522 | | |
| SEQ ID | COMP ID | CTGGTGAATTACCTGTGC | | | 1025 | 1042 | SEQ ID | GCACAGGTAATTCACCAG | 2.77 |
| 895 | 895 | | | | | | 2523 | | |
| SEQ ID | COMP ID | CCCTGGTGAATTACCTGT | | | 1027 | 1044 | SEQ ID | ACAGGTAATTCACCAGGG | 1.25 |
| 896 | 896 | | | | | | 2524 | | |
| SEQ ID | COMP ID | CTCCCTGGTGAATTACCT | | | 1029 | 1046 | SEQ ID | AGGTAATTCACCAGGGAG | 2.17 |
| 897 | 897 | | | | | | 2525 | | |
| SEQ ID | COMP ID | GGCTCCCTGGTGAATTAC | | | 1031 | 1048 | SEQ ID | GTAATTCACCAGGGAGCC | 1.49 |
| 898 | 898 | | | | | | 2526 | | |
| SEQ ID | COMP ID | TCGGCTCCCTGGTGAATT | | | 1033 | 1050 | SEQ ID | AATTCACCAGGGAGCCGA | 1 |
| 899 | 899 | | | | | | 2527 | | |
| SEQ ID | COMP ID | GTTCGGCTCCCTGGTGAA | | | 1035 | 1052 | SEQ ID | TTCACCAGGGAGCCGAAC | 1.21 |
| 900 | 900 | | | | | | 2528 | | |
| SEQ ID | COMP ID | GTGTTCGGCTCCCTGGTG | | | 1037 | 1054 | SEQ ID | CACCAGGGAGCCGAACAC | no data |
| 901 | 901 | | | | | | 2529 | | |
| SEQ ID | COMP ID | GAGTGTTCGGCTCCCTGG | | | 1039 | 1056 | SEQ ID | CCAGGGAGCCGAACACTC | 0.95 |
| 902 | 902 | | | | | | 2530 | | |
| SEQ ID | COMP ID | AGGAGTGTTCGGCTCCCT | | | 1041 | 1058 | SEQ ID | AGGGAGCCGAACACTCCT | 1.27 |
| 903 | 903 | | | | | | 2531 | | |
| SEQ ID | COMP ID | ACAGGAGTGTTCGGCTCC | | | 1043 | 1060 | SEQ ID | GGAGCCGAACACTCCTGT | no data |
| 904 | 904 | | | | | | 2532 | | |
| SEQ ID | COMP ID | GCACAGGAGTGTTCGGCT | | | 1045 | 1062 | SEQ ID | AGCCGAACACTCCTGTGC | 1.17 |
| 905 | 905 | | | | | | 2533 | | |
| SEQ ID | COMP ID | TGGATACCACTGCGGGGG | | | 1327 | 1344 | SEQ ID | CCCCCGCAGTGGTATCCA | 4.37 |
| 906 | 906 | | | | | | 2534 | | |
| SEQ ID | COMP ID | TGTGGATACCACTGCGGG | | | 1329 | 1346 | SEQ ID | CCCGCAGTGGTATCCACA | 1.46 |
| 907 | 907 | | | | | | 2535 | | |
| SEQ ID | COMP ID | GGTGTGGATACCACTGCG | | | 1331 | 1348 | SEQ ID | CGCAGTGGTATCCACACC | 1.33 |
| 908 | 908 | | | | | | 2536 | | |
| SEQ ID | COMP ID | TGGGAATGGTGCAACAGG | | | 1472 | 1489 | SEQ ID | CCTGTTGCACCATTCCCA | 1.8 |
| 909 | 909 | | | | | | 2537 | | |
| SEQ ID | COMP ID | CCTGGGAATGGTGCAACA | | | 1474 | 1491 | SEQ ID | TGTTGCACCATTCCCAGG | 1.31 |
| 910 | 910 | | | | | | 2538 | | |
| SEQ ID | COMP ID | TGCCTGGGAATGGTGCAA | | | 1476 | 1493 | SEQ ID | TTGCACCATTCCCAGGCA | no data |
| 911 | 911 | | | | | | 2539 | | |
| SEQ ID | COMP ID | AGTGCCTGGGAATGGTGC | | | 1478 | 1495 | SEQ ID | GCACCATTCCCAGGCACT | 1.25 |
| 912 | 912 | | | | | | 2540 | | |
| SEQ ID | COMP ID | ACACCTATAACACGTCAC | | | 1578 | 1595 | SEQ ID | GTGACGTGTTATAGGTGT | 1.1 |
| 913 | 913 | | | | | | 2541 | | |
| SEQ ID | COMP ID | GGACACCTATAACACGTC | | | 1580 | 1597 | SEQ ID | GACGTGTTATAGGTGTCC | 1.15 |
| 914 | 914 | | | | | | 2542 | | |
| SEQ ID | COMP ID | AGGGACACCTATAACACG | | | 1582 | 1599 | SEQ ID | CGTGTTATAGGTGTCCCT | 0.95 |
| 915 | 915 | | | | | | 2543 | | |
| SEQ ID | COMP ID | CAGCCGACATGTCATTTC | | | 1736 | 1753 | SEQ ID | GAAATGACATGTCGGCTG | 1.69 |
| 916 | 916 | | | | | | 2544 | | |
| SEQ ID | COMP ID | CCCAGCCGACATGTCATT | | | 1738 | 1755 | SEQ ID | AATGACATGTCGGCTGGG | no data |
| 917 | 917 | | | | | | 2545 | | |
| SEQ ID | COMP ID | CGCCCAGCCGACATGTCA | | | 1740 | 1757 | SEQ ID | TGACATGTCGGCTGGGCG | 1.53 |
| 918 | 918 | | | | | | 2546 | | |
| SEQ ID | COMP ID | CACGCCCAGCCGACATGT | | | 1742 | 1759 | SEQ ID | ACATGTCGGCTGGGCGTG | 1.27 |
| 919 | 919 | | | | | | 2547 | | |
| SEQ ID | COMP ID | ACCACGCCCAGCCGACAT | | | 1744 | 1761 | SEQ ID | ATGTCGGCTGGGCGTGGT | 0.96 |
| 920 | 920 | | | | | | 2548 | | |
| SEQ ID | COMP ID | ATGGCATTTCTTTTTCTT | | | 2048 | 2065 | SEQ ID | AAGAAAAAGAAATGCCAT | 1.2 |
| 921 | 921 | | | | | | 2549 | | |
| SEQ ID | COMP ID | ACATGGCATTTCTTTTTC | | | 2050 | 2067 | SEQ ID | GAAAAAGAAATGCCATGT | 1.38 |
| 922 | 922 | | | | | | 2550 | | |
| SEQ ID | COMP ID | TTACATGGCATTTCTTTT | | | 2052 | 2069 | SEQ ID | AAAAGAAATGCCATGTAA | 1.17 |
| 923 | 923 | | | | | | 2551 | | |
| SEQ ID | COMP ID | ATTTACATGGCATTTCTT | | | 2054 | 2071 | SEQ ID | AAGAAATGCCATGTAAAT | no data |
| 924 | 924 | | | | | | 2552 | | |
| SEQ ID | COMP ID | GGCTTACGATGGGTGCAT | | | 2135 | 2152 | SEQ ID | ATGCACCCATCGTAAGCC | 1.28 |
| 925 | 925 | | | | | | 2553 | | |
| SEQ ID | COMP ID | TAGGCTTACGATGGGTGC | | | 2137 | 2154 | SEQ ID | GCACCCATCGTAAGCCTA | 1.6 |
| 926 | 926 | | | | | | 2554 | | |
| SEQ ID | COMP ID | GTTAGGCTTACGATGGGT | | | 2139 | 2156 | SEQ ID | ACCCATCGTAAGCCTAAC | 3.46 |
| 927 | 927 | | | | | | 2555 | | |
| SEQ ID | COMP ID | TAGTTAGGCTTACGATGG | | | 2141 | 2158 | SEQ ID | CCATCGTAAGCCTAACTA | 1.89 |
| 928 | 928 | | | | | | 2556 | | |
| SEQ ID | COMP ID | AAAAAACCCCTGAAAATG | | | 2185 | 2202 | SEQ ID | CATTTTCAGGGGTTTTTT | 1.08 |
| 929 | 929 | | | | | | 2557 | | |
| SEQ ID | COMP ID | CAAAAAAACCCCTGAAAA | | | 2187 | 2204 | SEQ ID | TTTTCAGGGGTTTTTTTG | 0.76 |
| 930 | 930 | | | | | | 2558 | | |
| SEQ ID | COMP ID | AACAAAAAAACCCCTGAA | | | 2189 | 2206 | SEQ ID | TTCAGGGGTTTTTTTGTT | 0.89 |
| 931 | 931 | | | | | | 2559 | | |
| SEQ ID | COMP ID | ATATATTGGGCGCGGTGG | | | 2487 | 2504 | SEQ ID | CCACCGCGCCCAATATAT | 3.89 |
| 932 | 932 | | | | | | 2560 | | |
| SEQ ID | COMP ID | AAATATATTGGGCGCGGT | | | 2489 | 2506 | SEQ ID | ACCGCGCCCAATATATTT | 4.84 |
| 933 | 933 | | | | | | 2561 | | |
| SEQ ID | COMP ID | CAAAATATATTGGGCGCG | | | 2491 | 2508 | SEQ ID | CGCGCCCAATATATTTTG | 3.54 |
| 934 | 934 | | | | | | 2562 | | |
| SEQ ID | COMP ID | ATCAAAATATATTGGGCG | | | 2493 | 2510 | SEQ ID | CGCCCAATATATTTTGAT | 1.46 |
| 935 | 935 | | | | | | 2563 | | |
| SEQ ID | COMP ID | TAAGTACAGTCAGCCCTC | | | 2526 | 2543 | SEQ ID | GAGGGCTGACTGTACTTA | 0.96 |
| 936 | 936 | | | | | | 2564 | | |
| SEQ ID | COMP ID | GTTAAGTACAGTCAGCCC | | | 2528 | 2545 | SEQ ID | GGGCTGACTGTACTTAAC | 1.05 |
| 937 | 937 | | | | | | 2565 | | |
| SEQ ID | COMP ID | ATGTTAAGTACAGTCAGC | | | 2530 | 2547 | SEQ ID | GCTGACTGTACTTAACAT | 1.19 |
| 938 | 938 | | | | | | 2566 | | |
| SEQ ID | COMP ID | CAGCCACACCTTTATTTT | | | 2572 | 2589 | SEQ ID | AAAATAAAGGTGTGGCTG | 1.01 |
| 939 | 939 | | | | | | 2567 | | |
| SEQ ID | COMP ID | CCCAGCCACACCTTTATT | | | 2574 | 2591 | SEQ ID | AATAAAGGTGTGGCTGGG | no data |
| 940 | 940 | | | | | | 2568 | | |
| SEQ ID | COMP ID | CACCCAGCCACACCTTTA | | | 2576 | 2593 | SEQ ID | TAAAGGTGTGGCTGGGTG | 0.97 |
| 941 | 941 | | | | | | 2569 | | |
| SEQ ID | COMP ID | CACACCCAGCCACACCTT | | | 2578 | 2595 | SEQ ID | AAGGTGTGGCTGGGTGTG | 0.97 |
| 942 | 942 | | | | | | 2570 | | |
| SEQ ID | COMP ID | ACCACACCCAGCCACACC | | | 2580 | 2597 | SEQ ID | GGTGTGGCTGGGTGTGGT | 0.95 |
| 943 | 943 | | | | | | 2571 | | |
| SEQ ID | COMP ID | TCACCCCCTTTTTTTTTT | | | 2850 | 2867 | SEQ ID | AAAAAAAAAAGGGGGTGA | 1.24 |
| 944 | 944 | | | | | | 2572 | | |
| SEQ ID | COMP ID | GCTCACCCCCTTTTTTTT | | | 2852 | 2869 | SEQ ID | AAAAAAAAGGGGGTGAGC | 1.06 |
| 945 | 945 | | | | | | 2573 | | |
| SEQ ID | COMP ID | CTGCTCACCCCCTTTTTT | | | 2854 | 2871 | SEQ ID | AAAAAAGGGGGTGAGCAG | 1.05 |
| 946 | 946 | | | | | | 2574 | | |
| SEQ ID | COMP ID | GTCTGCTCACCCCCTTTT | | | 2856 | 2873 | SEQ ID | AAAAGGGGGTGAGCAGAC | 1.29 |
| 947 | 947 | | | | | | 2575 | | |
| SEQ ID | COMP ID | ACGTCTGCTCACCCCCTT | | | 2858 | 2875 | SEQ ID | AAGGGGGTGAGCAGACGT | 1.19 |
| 948 | 948 | | | | | | 2576 | | |
| SEQ ID | COMP ID | CCACGTCTGCTCACCCCC | | | 2860 | 2877 | SEQ ID | GGGGGTGAGCAGACGTGG | 1 |
| 949 | 949 | | | | | | 2577 | | |
| SEQ ID | COMP ID | CACCACGTCTGCTCACCC | | | 2862 | 2879 | SEQ ID | GGGTGAGCAGACGTGGTG | 1.09 |
| 950 | 950 | | | | | | 2578 | | |
| SEQ ID | COMP ID | CTTTACTTTTATTTTATT | | | 2989 | 3006 | SEQ ID | AATAAAATAAAAGTAAAG | 1.1 |
| 951 | 951 | | | | | | 2579 | | |
| SEQ ID | COMP ID | ACCTTTACTTTTATTTTA | | | 2991 | 3008 | SEQ ID | TAAAATAAAAGTAAAGGT | 1.49 |
| 952 | 952 | | | | | | 2580 | | |
| SEQ ID | COMP ID | ATACCTTTACTTTTATTT | | | 2993 | 3010 | SEQ ID | AAATAAAAGTAAAGGTAT | 1.29 |
| 953 | 953 | | | | | | 2581 | | |
| SEQ ID | COMP ID | TAATACCTTTACTTTTAT | | | 2995 | 3012 | SEQ ID | ATAAAAGTAAAGGTATTA | 1.27 |
| 954 | 954 | | | | | | 2582 | | |
| SEQ ID | COMP ID | AAACAGTAATGTCTGTTG | | | 3090 | 3107 | SEQ ID | CAACAGACATTACTGTTT | 1.38 |
| 955 | 955 | | | | | | 2583 | | |
| SEQ ID | COMP ID | AAAAACAGTAATGTCTGT | | | 3092 | 3109 | SEQ ID | ACAGACATTACTGTTTTT | 1.36 |
| 956 | 956 | | | | | | 2584 | | |
| SEQ ID | COMP ID | GCAAAAACAGTAATGTCT | | | 3094 | 3111 | SEQ ID | AGACATTACTGTTTTTGC | 1.23 |
| 957 | 957 | | | | | | 2585 | | |
| SEQ ID | COMP ID | AAGCAAAAACAGTAATGT | | | 3096 | 3113 | SEQ ID | ACATTACTGTTTTTGCTT | 1.25 |
| 958 | 958 | | | | | | 2586 | | |
| SEQ ID | COMP ID | TTAAGCCCACGCCACCCT | | | 4023 | 4040 | SEQ ID | AGGGTGGCGTGGGCTTAA | 0.78 |
| 959 | 959 | | | | | | 2587 | | |
| SEQ ID | COMP ID | GCTTAAGCCCACGCCACC | | | 4025 | 4042 | SEQ ID | GGTGGCGTGGGCTTAAGC | 1.18 |
| 960 | 960 | | | | | | 2588 | | |
| SEQ ID | COMP ID | CTGCTTAAGCCCACGCCA | | | 4027 | 4044 | SEQ ID | TGGCGTGGGCTTAAGCAG | 1.25 |
| 961 | 961 | | | | | | 2589 | | |
| SEQ ID | COMP ID | AACTGCTTAAGCCCACGC | | | 4029 | 4046 | SEQ ID | GCGTGGGCTTAAGCAGTT | 1.32 |
| 962 | 962 | | | | | | 2590 | | |
| SEQ ID | COMP ID | GCAACTGCTTAAGCCCAC | | | 4031 | 4048 | SEQ ID | GTGGGCTTAAGCAGTTGC | 1.31 |
| 963 | 963 | | | | | | 2591 | | |
| SEQ ID | COMP ID | TGGCAACTGCTTAAGCCC | | | 4033 | 4050 | SEQ ID | GGGCTTAAGCAGTTGCCA | 1.06 |
| 964 | 964 | | | | | | 2592 | | |
| SEQ ID | COMP ID | TCTGGCAACTGCTTAAGC | | | 4035 | 4052 | SEQ ID | GCTTAAGCAGTTGCCAGA | 1.28 |
| 965 | 965 | | | | | | 2593 | | |
| SEQ ID | COMP ID | CGTCTGGCAACTGCTTAA | | | 4037 | 4054 | SEQ ID | TTAAGCAGTTGCCAGACG | 1.02 |
| 966 | 966 | | | | | | 2594 | | |
| SEQ ID | COMP ID | AACGTCTGGCAACTGCTT | | | 4039 | 4056 | SEQ ID | AAGCAGTTGCCAGACGTT | 1.78 |
| 967 | 967 | | | | | | 2595 | | |
| SEQ ID | COMP ID | GGAACGTCTGGCAACTGC | | | 4041 | 4058 | SEQ ID | GCAGTTGCCAGACGTTCC | 1.32 |
| 968 | 968 | | | | | | 2596 | | |
| SEQ ID | COMP ID | AAGGAACGTCTGGCAACT | | | 4043 | 4060 | SEQ ID | AGTTGCCAGACGTTCCTT | 1.17 |
| 969 | 969 | | | | | | 2597 | | |
| SEQ ID | COMP ID | CCAAGGAACGTCTGGCAA | | | 4045 | 4062 | SEQ ID | TTGCCAGACGTTCCTTGG | 1.29 |
| 970 | 970 | | | | | | 2598 | | |
| SEQ ID | COMP ID | TACCAAGGAACGTCTGGC | | | 4047 | 4064 | SEQ ID | GCCAGACGTTCCTTGGTA | 1.34 |
| 971 | 971 | | | | | | 2599 | | |
| SEQ ID | COMP ID | AGTACCAAGGAACGTCTG | | | 4049 | 4066 | SEQ ID | CAGACGTTCCTTGGTACT | no data |
| 972 | 972 | | | | | | 2600 | | |
| SEQ ID | COMP ID | AAAGTACCAAGGAACGTC | | | 4051 | 4068 | SEQ ID | GACGTTCCTTGGTACTTT | 1.1 |
| 973 | 973 | | | | | | 2601 | | |
| SEQ ID | COMP ID | GCAAAGTACCAAGGAACG | | | 4053 | 4070 | SEQ ID | CGTTCCTTGGTACTTTGC | 1.05 |
| 974 | 974 | | | | | | 2602 | | |
| SEQ ID | COMP ID | CTGCAAAGTACCAAGGAA | | | 4055 | 4072 | SEQ ID | TTCCTTGGTACTTTGCAG | 1.11 |
| 975 | 975 | | | | | | 2603 | | |
| SEQ ID | COMP ID | AGCTCACCAGGGTCCACA | 258 | 275 | 4081 | 4098 | SEQ ID | TGTGGACCCTGGTGAGCT | 1.11 |
| 976 | 976 | | | | | | 2604 | | |
| SEQ ID | COMP ID | CCAGCTCACCAGGGTCCA | 260 | 277 | 4083 | 4100 | SEQ ID | TGGACCCTGGTGAGCTGG | 0.95 |
| 977 | 977 | | | | | | 2605 | | |
| SEQ ID | COMP ID | ACCCAGCTCACCAGGGTC | 262 | 279 | 4085 | 4102 | SEQ ID | GACCCTGGTGAGCTGGGT | 1.1 |
| 978 | 978 | | | | | | 2606 | | |
| SEQ ID | COMP ID | CCACCCAGCTCACCAGGG | 264 | 281 | 4087 | 4104 | SEQ ID | CCCTGGTGAGCTGGGTGG | 0.98 |
| 979 | 979 | | | | | | 2607 | | |
| SEQ ID | COMP ID | GGCCACCCAGCTCACCAG | 266 | 283 | 4089 | 4106 | SEQ ID | CTGGTGAGCTGGGTGGCC | no data |
| 980 | 980 | | | | | | 2608 | | |
| SEQ ID | COMP ID | AAGGCCACCCAGCTCACC | 268 | 285 | 4091 | 4108 | SEQ ID | GGTGAGCTGGGTGGCCTT | 0.98 |
| 981 | 981 | | | | | | 2609 | | |
| SEQ ID | COMP ID | TTAAGGCCACCCAGCTCA | 270 | 287 | 4093 | 4110 | SEQ ID | TGAGCTGGGTGGCCTTAA | 1.11 |
| 982 | 982 | | | | | | 2610 | | |
| SEQ ID | COMP ID | TGTTAAGGCCACCCAGCT | 272 | 289 | 4095 | 4112 | SEQ ID | AGCTGGGTGGCCTTAACA | no data |
| 983 | 983 | | | | | | 2611 | | |
| SEQ ID | COMP ID | GCTGTTAAGGCCACCCAG | 274 | 291 | 4097 | 4114 | SEQ ID | CTGGGTGGCCTTAACAGC | no data |
| 984 | 984 | | | | | | 2612 | | |
| SEQ ID | COMP ID | CTGCTGTTAAGGCCACCC | 276 | 293 | 4099 | 4116 | SEQ ID | GGGTGGCCTTAACAGCAG | 1.37 |
| 985 | 985 | | | | | | 2613 | | |
| SEQ ID | COMP ID | CCCTGCTGTTAAGGCCAC | 278 | 295 | 4101 | 4118 | SEQ ID | GTGGCCTTAACAGCAGGG | 1.15 |
| 986 | 986 | | | | | | 2614 | | |
| SEQ ID | COMP ID | AGCCCTGCTGTTAAGGCC | 280 | 297 | 4103 | 4120 | SEQ ID | GGCCTTAACAGCAGGGCT | 1.32 |
| 987 | 987 | | | | | | 2615 | | |
| SEQ ID | COMP ID | CCAGCCCTGCTGTTAAGG | 282 | 299 | 4105 | 4122 | SEQ ID | CCTTAACAGCAGGGCTGG | no data |
| 988 | 988 | | | | | | 2616 | | |
| SEQ ID | COMP ID | CACCAGCCCTGCTGTTAA | 284 | 301 | 4107 | 4124 | SEQ ID | TTAACAGCAGGGCTGGTG | no data |
| 989 | 989 | | | | | | 2617 | | |
| SEQ ID | COMP ID | GCCACCAGCCCTGCTGTT | 286 | 303 | 4109 | 4126 | SEQ ID | AACAGCAGGGCTGGTGGC | no data |
| 990 | 990 | | | | | | 2618 | | |
| SEQ ID | COMP ID | CAGCCACCAGCCCTGCTG | 288 | 305 | 4111 | 4128 | SEQ ID | CAGCAGGGCTGGTGGCTG | 1.03 |
| 991 | 991 | | | | | | 2619 | | |
| SEQ ID | COMP ID | TCCAGCCACCAGCCCTGC | 290 | 307 | 4113 | 4130 | SEQ ID | GCAGGGCTGGTGGCTGGA | no data |
| 992 | 992 | | | | | | 2620 | | |
| SEQ ID | COMP ID | GTTCCAGCCACCAGCCCT | 292 | 309 | 4115 | 4132 | SEQ ID | AGGGCTGGTGGCTGGAAC | no data |
| 993 | 993 | | | | | | 2621 | | |
| SEQ ID | COMP ID | GCGTTCCAGCCACCAGCC | 294 | 311 | 4117 | 4134 | SEQ ID | GGCTGGTGGCTGGAACGC | 1.08 |
| 994 | 994 | | | | | | 2622 | | |
| SEQ ID | COMP ID | CCGCGTTCCAGCCACCAG | 296 | 313 | 4119 | 4136 | SEQ ID | CTGGTGGCTGGAACGCGG | 1.3 |
| 995 | 995 | | | | | | 2623 | | |
| SEQ ID | COMP ID | CACCGCGTTCCAGCCACC | 298 | 315 | 4121 | 4138 | SEQ ID | GGTGGCTGGAACGCGGTG | 1.1 |
| 996 | 996 | | | | | | 2624 | | |
| SEQ ID | COMP ID | GGCACCGCGTTCCAGCCA | 300 | 317 | 4123 | 4140 | SEQ ID | TGGCTGGAACGCGGTGCC | 1.37 |
| 997 | 997 | | | | | | 2625 | | |
| SEQ ID | COMP ID | TGGGCACCGCGTTCCAGC | 302 | 319 | 4125 | 4142 | SEQ ID | GCTGGAACGCGGTGCCCA | 2.02 |
| 998 | 998 | | | | | | 2626 | | |
| SEQ ID | COMP ID | TCTGGGCACCGCGTTCCA | 304 | 321 | 4127 | 4144 | SEQ ID | TGGAACGCGGTGCCCAGA | 1.39 |
| 999 | 999 | | | | | | 2627 | | |
| SEQ ID | COMP ID | CATCTGGGCACCGCGTTC | 306 | 323 | 4129 | 4146 | SEQ ID | GAACGCGGTGCCCAGATG | 3.11 |
| 1000 | 1000 | | | | | | 2628 | | |
| SEQ ID | COMP ID | ACCATCTGGGCACCGCGT | 308 | 325 | 4131 | 4148 | SEQ ID | ACGCGGTGCCCAGATGGT | 1.72 |
| 1001 | 1001 | | | | | | 2629 | | |
| SEQ ID | COMP ID | TGACCATCTGGGCACCGC | 310 | 327 | 4133 | 4150 | SEQ ID | GCGGTGCCCAGATGGTCA | 1.59 |
| 1002 | 1002 | | | | | | 2630 | | |
| SEQ ID | COMP ID | ACTGACCATCTGGGCACC | 312 | 329 | 4135 | 4152 | SEQ ID | GGTGCCCAGATGGTCAGT | 2.08 |
| 1003 | 1003 | | | | | | 2631 | | |
| SEQ ID | COMP ID | GAACTGACCATCTGGGCA | 314 | 331 | 4137 | 4154 | SEQ ID | TGCCCAGATGGTCAGTTC | 1.41 |
| 1004 | 1004 | | | | | | 2632 | | |
| SEQ ID | COMP ID | CAGAACTGACCATCTGGG | 316 | 333 | 4139 | 4156 | SEQ ID | CCCAGATGGTCAGTTCTG | 1.56 |
| 1005 | 1005 | | | | | | 2633 | | |
| SEQ ID | COMP ID | GGCAGAACTGACCATCTG | 318 | 335 | 4141 | 4158 | SEQ ID | CAGATGGTCAGTTCTGCC | 1.44 |
| 1006 | 1006 | | | | | | 2634 | | |
| SEQ ID | COMP ID | AGGGCAGAACTGACCATC | 320 | 337 | 4143 | 4160 | SEQ ID | GATGGTCAGTTCTGCCCT | 1.27 |
| 1007 | 1007 | | | | | | 2635 | | |
| SEQ ID | COMP ID | ACAGGGCAGAACTGACCA | 322 | 339 | 4145 | 4162 | SEQ ID | TGGTCAGTTCTGCCCTGT | 1.42 |
| 1008 | 1008 | | | | | | 2636 | | |
| SEQ ID | COMP ID | CCACAGGGCAGAACTGAC | 324 | 341 | 4147 | 4164 | SEQ ID | GTCAGTTCTGCCCTGTGG | 1.19 |
| 1009 | 1009 | | | | | | 2637 | | |
| SEQ ID | COMP ID | GGCCACAGGGCAGAACTG | 326 | 343 | 4149 | 4166 | SEQ ID | CAGTTCTGCCCTGTGGCC | 1.68 |
| 1010 | 1010 | | | | | | 2638 | | |
| SEQ ID | COMP ID | CAGGCCACAGGGCAGAAC | 328 | 345 | 4151 | 4168 | SEQ ID | GTTCTGCCCTGTGGCCTG | 3.42 |
| 1011 | 1011 | | | | | | 2639 | | |
| SEQ ID | COMP ID | AGCAGGCCACAGGGCAGA | 330 | 347 | 4153 | 4170 | SEQ ID | TCTGCCCTGTGGCCTGCT | 2.95 |
| 1012 | 1012 | | | | | | 2640 | | |
| SEQ ID | COMP ID | GCAGCAGGCCACAGGGCA | 332 | 349 | 4155 | 4172 | SEQ ID | TGCCCTGTGGCCTGCTGC | 1.37 |
| 1013 | 1013 | | | | | | 2641 | | |
| SEQ ID | COMP ID | AGGCAGCAGGCCACAGGG | 334 | 351 | 4157 | 4174 | SEQ ID | CCCTGTGGCCTGCTGCCT | 1.46 |
| 1014 | 1014 | | | | | | 2642 | | |
| SEQ ID | COMP ID | CCAGGCAGCAGGCCACAG | 336 | 353 | 4159 | 4176 | SEQ ID | CTGTGGCCTGCTGCCTGG | 1.34 |
| 1015 | 1015 | | | | | | 2643 | | |
| SEQ ID | COMP ID | GTCCAGGCAGCAGGCCAC | 338 | 355 | 4161 | 4178 | SEQ ID | GTGGCCTGCTGCCTGGAC | 1.49 |
| 1016 | 1016 | | | | | | 2644 | | |
| SEQ ID | COMP ID | GGGTCCAGGCAGCAGGCC | 340 | 357 | 4163 | 4180 | SEQ ID | GGCCTGCTGCCTGGACCC | 1.45 |
| 1017 | 1017 | | | | | | 2645 | | |
| SEQ ID | COMP ID | CGGGGTCCAGGCAGCAGG | 342 | 359 | 4165 | 4182 | SEQ ID | CCTGCTGCCTGGACCCCG | 1.31 |
| 1018 | 1018 | | | | | | 2646 | | |
| SEQ ID | COMP ID | TCCGGGGTCCAGGCAGCA | 344 | 361 | 4167 | 4184 | SEQ ID | TGCTGCCTGGACCCCGGA | 1.37 |
| 1019 | 1019 | | | | | | 2647 | | |
| SEQ ID | COMP ID | CCTCCGGGGTCCAGGCAG | 346 | 363 | 4169 | 4186 | SEQ ID | CTGCCTGGACCCCGGAGG | 1.27 |
| 1020 | 1020 | | | | | | 2648 | | |
| SEQ ID | COMP ID | CTCCTCCGGGGTCCAGGC | 348 | 365 | 4171 | 4188 | SEQ ID | GCCTGGACCCCGGAGGAG | 1.5 |
| 1021 | 1021 | | | | | | 2649 | | |
| SEQ ID | COMP ID | GGCTCCTCCGGGGTCCAG | 350 | 367 | 4173 | 4190 | SEQ ID | CTGGACCCCGGAGGAGCC | 1.12 |
| 1022 | 1022 | | | | | | 2650 | | |
| SEQ ID | COMP ID | CTGGCTCCTCCGGGGTCC | 352 | 369 | 4175 | 4192 | SEQ ID | GGACCCCGGAGGAGCCAG | 1.99 |
| 1023 | 1023 | | | | | | 2651 | | |
| SEQ ID | COMP ID | AGCTGGCTCCTCCGGGGT | 354 | 371 | 4177 | 4194 | SEQ ID | ACCCCGGAGGAGCCAGCT | 3.06 |
| 1024 | 1024 | | | | | | 2652 | | |
| SEQ ID | COMP ID | GTAGCTGGCTCCTCCGGG | 356 | 373 | 4179 | 4196 | SEQ ID | CCCGGAGGAGCCAGCTAC | 1.47 |
| 1025 | 1025 | | | | | | 2653 | | |
| SEQ ID | COMP ID | CTGTAGCTGGCTCCTCCG | 358 | 375 | 4181 | 4198 | SEQ ID | CGGAGGAGCCAGCTACAG | 1.28 |
| 1026 | 1026 | | | | | | 2654 | | |
| SEQ ID | COMP ID | AGCTGTAGCTGGCTCCTC | 360 | 377 | 4183 | 4200 | SEQ ID | GAGGAGCCAGCTACAGCT | 1.51 |
| 1027 | 1027 | | | | | | 2655 | | |
| SEQ ID | COMP ID | GCAGCTGTAGCTGGCTCC | 362 | 379 | 4185 | 4202 | SEQ ID | GGAGCCAGCTACAGCTGC | 1.39 |
| 1028 | 1028 | | | | | | 2656 | | |
| SEQ ID | COMP ID | CAGCAGCTGTAGCTGGCT | 364 | 381 | 4187 | 4204 | SEQ ID | AGCCAGCTACAGCTGCTG | no data |
| 1029 | 1029 | | | | | | 2657 | | |
| SEQ ID | COMP ID | GGCAGCAGCTGTAGCTGG | 366 | 383 | 4189 | 4206 | SEQ ID | CCAGCTACAGCTGCTGCC | 2.41 |
| 1030 | 1030 | | | | | | 2658 | | |
| SEQ ID | COMP ID | ACGGCAGCAGCTGTAGCT | 368 | 385 | 4191 | 4208 | SEQ ID | AGCTACAGCTGCTGCCGT | 1.28 |
| 1031 | 1031 | | | | | | 2659 | | |
| SEQ ID | COMP ID | GGACGGCAGCAGCTGTAG | 370 | 387 | 4193 | 4210 | SEQ ID | CTACAGCTGCTGCCGTCC | 1.38 |
| 1032 | 1032 | | | | | | 2660 | | |
| SEQ ID | COMP ID | GGGGACGGCAGCAGCTGT | 372 | 389 | 4195 | 4212 | SEQ ID | ACAGCTGCTGCCGTCCCC | 1.3 |
| 1033 | 1033 | | | | | | 2661 | | |
| SEQ ID | COMP ID | AAGGGGACGGCAGCAGCT | 374 | 391 | 4197 | 4214 | SEQ ID | AGCTGCTGCCGTCCCCTT | 1.09 |
| 1034 | 1034 | | | | | | 2662 | | |
| SEQ ID | COMP ID | AGAAGGGGACGGCAGCAG | 376 | 393 | 4199 | 4216 | SEQ ID | CTGCTGCCGTCCCCTTCT | 1.46 |
| 1035 | 1035 | | | | | | 2663 | | |
| SEQ ID | COMP ID | CCAGAAGGGGACGGCAGC | 378 | 395 | 4201 | 4218 | SEQ ID | GCTGCCGTCCCCTTCTGG | 1.43 |
| 1036 | 1036 | | | | | | 2664 | | |
| SEQ ID | COMP ID | CACCAGAAGGGGACGGCA | | | 4203 | 4220 | SEQ ID | TGCCGTCCCCTTCTGGTG | 2.14 |
| 1037 | 1037 | | | | | | 2665 | | |
| SEQ ID | COMP ID | CTCACCAGAAGGGGACGG | | | 4205 | 4222 | SEQ ID | CCGTCCCCTTCTGGTGAG | 1.57 |
| 1038 | 1038 | | | | | | 2666 | | |
| SEQ ID | COMP ID | CACTCACCAGAAGGGGAC | | | 4207 | 4224 | SEQ ID | GTCCCCTTCTGGTGAGTG | 1.99 |
| 1039 | 1039 | | | | | | 2667 | | |
| SEQ ID | COMP ID | GGCACTCACCAGAAGGGG | | | 4209 | 4226 | SEQ ID | CCCCTTCTGGTGAGTGCC | 1.3 |
| 1040 | 1040 | | | | | | 2668 | | |
| SEQ ID | COMP ID | GGGGCACTCACCAGAAGG | | | 4211 | 4228 | SEQ ID | CCTTCTGGTGAGTGCCCC | 1.55 |
| 1041 | 1041 | | | | | | 2669 | | |
| SEQ ID | COMP ID | GAGGGGCACTCACCAGAA | | | 4213 | 4230 | SEQ ID | TTCTGGTGAGTGCCCCTC | 1.6 |
| 1042 | 1042 | | | | | | 2670 | | |
| SEQ ID | COMP ID | CTGAGGGGCACTCACCAG | | | 4215 | 4232 | SEQ ID | CTGGTGAGTGCCCCTCAG | 1.45 |
| 1043 | 1043 | | | | | | 2671 | | |
| SEQ ID | COMP ID | GGCTGAGGGGCACTCACC | | | 4217 | 4234 | SEQ ID | GGTGAGTGCCCCTCAGCC | 1.36 |
| 1044 | 1044 | | | | | | 2672 | | |
| SEQ ID | COMP ID | TAGGCTGAGGGGCACTCA | | | 4219 | 4236 | SEQ ID | TGAGTGCCCCTCAGCCTA | 1.04 |
| 1045 | 1045 | | | | | | 2673 | | |
| SEQ ID | COMP ID | CCTAGGCTGAGGGGCACT | | | 4221 | 4238 | SEQ ID | AGTGCCCCTCAGCCTAGG | 1.28 |
| 1046 | 1046 | | | | | | 2674 | | |
| SEQ ID | COMP ID | TGCCTAGGCTGAGGGGCA | | | 4223 | 4240 | SEQ ID | TGCCCCTCAGCCTAGGCA | 1.04 |
| 1047 | 1047 | | | | | | 2675 | | |
| SEQ ID | COMP ID | CTTGCCTAGGCTGAGGGG | | | 4225 | 4242 | SEQ ID | CCCCTCAGCCTAGGCAAG | 2.21 |
| 1048 | 1048 | | | | | | 2676 | | |
| SEQ ID | COMP ID | CTCTTGCCTAGGCTGAGG | | | 4227 | 4244 | SEQ ID | CCTCAGCCTAGGCAAGAG | 2.23 |
| 1049 | 1049 | | | | | | 2677 | | |
| SEQ ID | COMP ID | AGCTCTTGCCTAGGCTGA | | | 4229 | 4246 | SEQ ID | TCAGCCTAGGCAAGAGCT | 1.6 |
| 1050 | 1050 | | | | | | 2678 | | |
| SEQ ID | COMP ID | CCAGCTCTTGCCTAGGCT | | | 4231 | 4248 | SEQ ID | AGCCTAGGCAAGAGCTGG | 2.54 |
| 1051 | 1051 | | | | | | 2679 | | |
| SEQ ID | COMP ID | TGCCAGCTCTTGCCTAGG | | | 4233 | 4250 | SEQ ID | CCTAGGCAAGAGCTGGCA | 1.49 |
| 1052 | 1052 | | | | | | 2680 | | |
| SEQ ID | COMP ID | GCTGCCAGCTCTTGCCTA | | | 4235 | 4252 | SEQ ID | TAGGCAAGAGCTGGCAGC | 1.33 |
| 1053 | 1053 | | | | | | 2681 | | |
| SEQ ID | COMP ID | AGGCTGCCAGCTCTTGCC | | | 4237 | 4254 | SEQ ID | GGCAAGAGCTGGCAGCCT | 2.65 |
| 1054 | 1054 | | | | | | 2682 | | |
| SEQ ID | COMP ID | CCAGGCTGCCAGCTCTTG | | | 4239 | 4256 | SEQ ID | CAAGAGCTGGCAGCCTGG | 1.35 |
| 1055 | 1055 | | | | | | 2683 | | |
| SEQ ID | COMP ID | ACCCAGGCTGCCAGCTCT | | | 4241 | 4258 | SEQ ID | AGAGCTGGCAGCCTGGGT | 1.36 |
| 1056 | 1056 | | | | | | 2684 | | |
| SEQ ID | COMP ID | AAACCCAGGCTGCCAGCT | | | 4243 | 4260 | SEQ ID | AGCTGGCAGCCTGGGTTT | 1.39 |
| 1057 | 1057 | | | | | | 2685 | | |
| SEQ ID | COMP ID | GAAAACCCAGGCTGCCAG | | | 4245 | 4262 | SEQ ID | CTGGCAGCCTGGGTTTTC | 1.98 |
| 1058 | 1058 | | | | | | 2686 | | |
| SEQ ID | COMP ID | GGGAAAACCCAGGCTGCC | | | 4247 | 4264 | SEQ ID | GGCAGCCTGGGTTTTCCC | 1.33 |
| 1059 | 1059 | | | | | | 2687 | | |
| SEQ ID | COMP ID | TTGGGAAAACCCAGGCTG | | | 4249 | 4266 | SEQ ID | CAGCCTGGGTTTTCCCAA | 1.98 |
| 1060 | 1060 | | | | | | 2688 | | |
| SEQ ID | COMP ID | CTTTGGGAAAACCCAGGC | | | 4251 | 4268 | SEQ ID | GCCTGGGTTTTCCCAAAG | 2.94 |
| 1061 | 1061 | | | | | | 2689 | | |
| SEQ ID | COMP ID | CTTGTGCCTGGCGTCCTC | | | 4291 | 4308 | SEQ ID | GAGGACGCCAGGCACAAG | 1.49 |
| 1062 | 1062 | | | | | | 2690 | | |
| SEQ ID | COMP ID | GACTTGTGCCTGGCGTCC | | | 4293 | 4310 | SEQ ID | GGACGCCAGGCACAAGTC | 2.06 |
| 1063 | 1063 | | | | | | 2691 | | |
| SEQ ID | COMP ID | CAGACTTGTGCCTGGCGT | | | 4295 | 4312 | SEQ ID | ACGCCAGGCACAAGTCTG | 0.96 |
| 1064 | 1064 | | | | | | 2692 | | |
| SEQ ID | COMP ID | CACAGACTTGTGCCTGGC | | | 4297 | 4314 | SEQ ID | GCCAGGCACAAGTCTGTG | 1.39 |
| 1065 | 1065 | | | | | | 2693 | | |
| SEQ ID | COMP ID | ACCACAGACTTGTGCCTG | | | 4299 | 4316 | SEQ ID | CAGGCACAAGTCTGTGGT | 3.05 |
| 1066 | 1066 | | | | | | 2694 | | |
| SEQ ID | COMP ID | AAACCACAGACTTGTGCC | | | 4301 | 4318 | SEQ ID | GGCACAAGTCTGTGGTTT | 1.3 |
| 1067 | 1067 | | | | | | 2695 | | |
| SEQ ID | COMP ID | ATAAACCACAGACTTGTG | | | 4303 | 4320 | SEQ ID | CACAAGTCTGTGGTTTAT | 1.03 |
| 1068 | 1068 | | | | | | 2696 | | |
| SEQ ID | COMP ID | TGATAAACCACAGACTTG | | | 4305 | 4322 | SEQ ID | CAAGTCTGTGGTTTATCA | 1.45 |
| 1069 | 1069 | | | | | | 2697 | | |
| SEQ ID | COMP ID | AATGATAAACCACAGACT | | | 4307 | 4324 | SEQ ID | AGTCTGTGGTTTATCATT | 1.7 |
| 1070 | 1070 | | | | | | 2698 | | |
| SEQ ID | COMP ID | AAAATGATAAACCACAGA | | | 4309 | 4326 | SEQ ID | TCTGTGGTTTATCATTTT | 3.49 |
| 1071 | 1071 | | | | | | 2699 | | |
| SEQ ID | COMP ID | GGAAAATGATAAACCACA | | | 4311 | 4328 | SEQ ID | TGTGGTTTATCATTTTCC | 4 |
| 1072 | 1072 | | | | | | 2700 | | |
| SEQ ID | COMP ID | AGGGAAAATGATAAACCA | | | 4313 | 4330 | SEQ ID | TGGTTTATCATTTTCCCT | 1.86 |
| 1073 | 1073 | | | | | | 2701 | | |
| SEQ ID | COMP ID | ACAGGGAAAATGATAAAC | | | 4315 | 4332 | SEQ ID | GTTTATCATTTTCCCTGT | 1.21 |
| 1074 | 1074 | | | | | | 2702 | | |
| SEQ ID | COMP ID | AGACAGGGAAAATGATAA | | | 4317 | 4334 | SEQ ID | TTATCATTTTCCCTGTCT | 1.56 |
| 1075 | 1075 | | | | | | 2703 | | |
| SEQ ID | COMP ID | AAAGACAGGGAAAATGAT | | | 4319 | 4336 | SEQ ID | ATCATTTTCCCTGTCTTT | 1.42 |
| 1076 | 1076 | | | | | | 2704 | | |
| SEQ ID | COMP ID | AGAAAGACAGGGAAAATG | | | 4321 | 4338 | SEQ ID | CATTTTCCCTGTCTTTCT | 1.43 |
| 1077 | 1077 | | | | | | 2705 | | |
| SEQ ID | COMP ID | CTAGAAAGACAGGGAAAA | | | 4323 | 4340 | SEQ ID | TTTTCCCTGTCTTTCTAG | 2.88 |
| 1078 | 1078 | | | | | | 2706 | | |
| SEQ ID | COMP ID | TCCTAGAAAGACAGGGAA | | | 4325 | 4342 | SEQ ID | TTCCCTGTCTTTCTAGGA | 1.09 |
| 1079 | 1079 | | | | | | 2707 | | |
| SEQ ID | COMP ID | TGTCCTAGAAAGACAGGG | | | 4327 | 4344 | SEQ ID | CCCTGTCTTTCTAGGACA | 1.31 |
| 1080 | 1080 | | | | | | 2708 | | |
| SEQ ID | COMP ID | TTTGTCCTAGAAAGACAG | | | 4329 | 4346 | SEQ ID | CTGTCTTTCTAGGACAAA | 1.75 |
| 1081 | 1081 | | | | | | 2709 | | |
| SEQ ID | COMP ID | CATTTGTCCTAGAAAGAC | | | 4331 | 4348 | SEQ ID | GTCTTTCTAGGACAAATG | 1.43 |
| 1082 | 1082 | | | | | | 2710 | | |
| SEQ ID | COMP ID | GCCATTTGTCCTAGAAAG | | | 4333 | 4350 | SEQ ID | CTTTCTAGGACAAATGGC | 2.88 |
| 1083 | 1083 | | | | | | 2711 | | |
| SEQ ID | COMP ID | GGGCCATTTGTCCTAGAA | | | 4335 | 4352 | SEQ ID | TTCTAGGACAAATGGCCC | 1.65 |
| 1084 | 1084 | | | | | | 2712 | | |
| SEQ ID | COMP ID | GTGGGCCATTTGTCCTAG | | | 4337 | 4354 | SEQ ID | CTAGGACAAATGGCCCAC | 1.73 |
| 1085 | 1085 | | | | | | 2713 | | |
| SEQ ID | COMP ID | TTGTGGGCCATTTGTCCT | | | 4339 | 4356 | SEQ ID | AGGACAAATGGCCCACAA | 1.52 |
| 1086 | 1086 | | | | | | 2714 | | |
| SEQ ID | COMP ID | TGTTGTGGGCCATTTGTC | 395 | 412 | 4341 | 4358 | SEQ ID | GACAAATGGCCCACAACA | 1.27 |
| 1087 | 1087 | | | | | | 2715 | | |
| SEQ ID | COMP ID | AGTGTTGTGGGCCATTTG | 397 | 414 | 4343 | 4360 | SEQ ID | CAAATGGCCCACAACACT | 1.35 |
| 1088 | 1088 | | | | | | 2716 | | |
| SEQ ID | COMP ID | TCAGTGTTGTGGGCCATT | 399 | 416 | 4345 | 4362 | SEQ ID | AATGGCCCACAACACTGA | 1.46 |
| 1089 | 1089 | | | | | | 2717 | | |
| SEQ ID | COMP ID | GCTCAGTGTTGTGGGCCA | 401 | 418 | 4347 | 4364 | SEQ ID | TGGCCCACAACACTGAGC | 1.49 |
| 1090 | 1090 | | | | | | 2718 | | |
| SEQ ID | COMP ID | CTGCTCAGTGTTGTGGGC | 403 | 420 | 4349 | 4366 | SEQ ID | GCCCACAACACTGAGCAG | 1.51 |
| 1091 | 1091 | | | | | | 2719 | | |
| SEQ ID | COMP ID | GCCTGCTCAGTGTTGTGG | 405 | 422 | 4351 | 4368 | SEQ ID | CCACAACACTGAGCAGGC | 1.5 |
| 1092 | 1092 | | | | | | 2720 | | |
| SEQ ID | COMP ID | ATGCCTGCTCAGTGTTGT | 407 | 424 | 4353 | 4370 | SEQ ID | ACAACACTGAGCAGGCAT | 1.56 |
| 1093 | 1093 | | | | | | 2721 | | |
| SEQ ID | COMP ID | AGATGCCTGCTCAGTGTT | 409 | 426 | 4355 | 4372 | SEQ ID | AACACTGAGCAGGCATCT | 1.43 |
| 1094 | 1094 | | | | | | 2722 | | |
| SEQ ID | COMP ID | CCAGATGCCTGCTCAGTG | 411 | 428 | 4357 | 4374 | SEQ ID | CACTGAGCAGGCATCTGG | 1.21 |
| 1095 | 1095 | | | | | | 2723 | | |
| SEQ ID | COMP ID | ACCCAGATGCCTGCTCAG | 413 | 430 | 4359 | 4376 | SEQ ID | CTGAGCAGGCATCTGGGT | 0.95 |
| 1096 | 1096 | | | | | | 2724 | | |
| SEQ ID | COMP ID | CCACCCAGATGCCTGCTC | 415 | 432 | 4361 | 4378 | SEQ ID | GAGCAGGCATCTGGGTGG | 0.95 |
| 1097 | 1097 | | | | | | 2725 | | |
| SEQ ID | COMP ID | GGCCACCCAGATGCCTGC | 417 | 434 | 4363 | 4380 | SEQ ID | GCAGGCATCTGGGTGGCC | 1.25 |
| 1098 | 1098 | | | | | | 2726 | | |
| SEQ ID | COMP ID | GGGGCCACCCAGATGCCT | 419 | 436 | 4365 | 4382 | SEQ ID | AGGCATCTGGGTGGCCCC | 1.44 |
| 1099 | 1099 | | | | | | 2727 | | |
| SEQ ID | COMP ID | CAGGGGCCACCCAGATGC | 421 | 438 | 4367 | 4384 | SEQ ID | GCATCTGGGTGGCCCCTG | 1.44 |
| 1100 | 1100 | | | | | | 2728 | | |
| SEQ ID | COMP ID | GGCAGGGGCCACCCAGAT | 423 | 440 | 4369 | 4386 | SEQ ID | ATCTGGGTGGCCCCTGCC | 1.05 |
| 1101 | 1101 | | | | | | 2729 | | |
| SEQ ID | COMP ID | CTGGCAGGGGCCACCCAG | 425 | 442 | 4371 | 4388 | SEQ ID | CTGGGTGGCCCCTGCCAG | 1.19 |
| 1102 | 1102 | | | | | | 2730 | | |
| SEQ ID | COMP ID | ACCTGGCAGGGGCCACCC | 427 | 444 | 4373 | 4390 | SEQ ID | GGGTGGCCCCTGCCAGGT | 0.94 |
| 1103 | 1103 | | | | | | 2731 | | |
| SEQ ID | COMP ID | CAACCTGGCAGGGGCCAC | 429 | 446 | 4375 | 4392 | SEQ ID | GTGGCCCCTGCCAGGTTG | 0.89 |
| 1104 | 1104 | | | | | | 2732 | | |
| SEQ ID | COMP ID | ATCAACCTGGCAGGGGCC | 431 | 448 | 4377 | 4394 | SEQ ID | GGCCCCTGCCAGGTTGAT | 1.01 |
| 1105 | 1105 | | | | | | 2733 | | |
| SEQ ID | COMP ID | GCATCAACCTGGCAGGGG | 433 | 450 | 4379 | 4396 | SEQ ID | CCCCTGCCAGGTTGATGC | 1.46 |
| 1106 | 1106 | | | | | | 2734 | | |
| SEQ ID | COMP ID | GGGCATCAACCTGGCAGG | 435 | 452 | 4381 | 4398 | SEQ ID | CCTGCCAGGTTGATGCCC | 1.04 |
| 1107 | 1107 | | | | | | 2735 | | |
| SEQ ID | COMP ID | GTGGGCATCAACCTGGCA | 437 | 454 | 4383 | 4400 | SEQ ID | TGCCAGGTTGATGCCCAC | 1.21 |
| 1108 | 1108 | | | | | | 2736 | | |
| SEQ ID | COMP ID | CAGTGGGCATCAACCTGG | 439 | 456 | 4385 | 4402 | SEQ ID | CCAGGTTGATGCCCACTG | 1.61 |
| 1109 | 1109 | | | | | | 2737 | | |
| SEQ ID | COMP ID | AGCAGTGGGCATCAACCT | 441 | 458 | 4387 | 4404 | SEQ ID | AGGTTGATGCCCACTGCT | 1.46 |
| 1110 | 1110 | | | | | | 2738 | | |
| SEQ ID | COMP ID | AGAGCAGTGGGCATCAAC | 443 | 460 | 4389 | 4406 | SEQ ID | GTTGATGCCCACTGCTCT | 1.91 |
| 1111 | 1111 | | | | | | 2739 | | |
| SEQ ID | COMP ID | GCAGAGCAGTGGGCATCA | 445 | 462 | 4391 | 4408 | SEQ ID | TGATGCCCACTGCTCTGC | 1.64 |
| 1112 | 1112 | | | | | | 2740 | | |
| SEQ ID | COMP ID | CGGCAGAGCAGTGGGCAT | 447 | 464 | 4393 | 4410 | SEQ ID | ATGCCCACTGCTCTGCCG | 1.71 |
| 1113 | 1113 | | | | | | 2741 | | |
| SEQ ID | COMP ID | GCCGGCAGAGCAGTGGGC | 449 | 466 | 4395 | 4412 | SEQ ID | GCCCACTGCTCTGCCGGC | 1.56 |
| 1114 | 1114 | | | | | | 2742 | | |
| SEQ ID | COMP ID | TGGCCGGCAGAGCAGTGG | 451 | 468 | 4397 | 4414 | SEQ ID | CCACTGCTCTGCCGGCCA | 2.52 |
| 1115 | 1115 | | | | | | 2743 | | |
| SEQ ID | COMP ID | AGTGGCCGGCAGAGCAGT | 453 | 470 | 4399 | 4416 | SEQ ID | ACTGCTCTGCCGGCCACT | 2.42 |
| 1116 | 1116 | | | | | | 2744 | | |
| SEQ ID | COMP ID | GGAGTGGCCGGCAGAGCA | 455 | 472 | 4401 | 4418 | SEQ ID | TGCTCTGCCGGCCACTCC | 2.76 |
| 1117 | 1117 | | | | | | 2745 | | |
| SEQ ID | COMP ID | CAGGAGTGGCCGGCAGAG | 457 | 474 | 4403 | 4420 | SEQ ID | CTCTGCCGGCCACTCCTG | 2.72 |
| 1118 | 1118 | | | | | | 2746 | | |
| SEQ ID | COMP ID | TGCAGGAGTGGCCGGCAG | 459 | 476 | 4405 | 4422 | SEQ ID | CTGCCGGCCACTCCTGCA | 2.53 |
| 1119 | 1119 | | | | | | 2747 | | |
| SEQ ID | COMP ID | GATGCAGGAGTGGCCGGC | 461 | 478 | 4407 | 4424 | SEQ ID | GCCGGCCACTCCTGCATC | 3.01 |
| 1120 | 1120 | | | | | | 2748 | | |
| SEQ ID | COMP ID | AAGATGCAGGAGTGGCCG | 463 | 480 | 4409 | 4426 | SEQ ID | CGGCCACTCCTGCATCTT | 2.48 |
| 1121 | 1121 | | | | | | 2749 | | |
| SEQ ID | COMP ID | TAAAGATGCAGGAGTGGC | 465 | 482 | 4411 | 4428 | SEQ ID | GCCACTCCTGCATCTTTA | 2.48 |
| 1122 | 1122 | | | | | | 2750 | | |
| SEQ ID | COMP ID | GGTAAAGATGCAGGAGTG | 467 | 484 | 4413 | 4430 | SEQ ID | CACTCCTGCATCTTTACC | 1.85 |
| 1123 | 1123 | | | | | | 2751 | | |
| SEQ ID | COMP ID | ACGGTAAAGATGCAGGAG | 469 | 486 | 4415 | 4432 | SEQ ID | CTCCTGCATCTTTACCGT | 1.92 |
| 1124 | 1124 | | | | | | 2752 | | |
| SEQ ID | COMP ID | AGACGGTAAAGATGCAGG | 471 | 488 | 4417 | 4434 | SEQ ID | CCTGCATCTTTACCGTCT | 1.59 |
| 1125 | 1125 | | | | | | 2753 | | |
| SEQ ID | COMP ID | TGAGACGGTAAAGATGCA | 473 | 490 | 4419 | 4436 | SEQ ID | TGCATCTTTACCGTCTCA | 1.73 |
| 1126 | 1126 | | | | | | 2754 | | |
| SEQ ID | COMP ID | CCTGAGACGGTAAAGATG | 475 | 492 | 4421 | 4438 | SEQ ID | CATCTTTACCGTCTCAGG | 1.82 |
| 1127 | 1127 | | | | | | 2755 | | |
| SEQ ID | COMP ID | TCCCTGAGACGGTAAAGA | 477 | 494 | 4423 | 4440 | SEQ ID | TCTTTACCGTCTCAGGGA | 1.56 |
| 1128 | 1128 | | | | | | 2756 | | |
| SEQ ID | COMP ID | AGTCCCTGAGACGGTAAA | 479 | 496 | 4425 | 4442 | SEQ ID | TTTACCGTCTCAGGGACT | 1.56 |
| 1129 | 1129 | | | | | | 2757 | | |
| SEQ ID | COMP ID | GAAGTCCCTGAGACGGTA | 481 | 498 | 4427 | 4444 | SEQ ID | TACCGTCTCAGGGACTTC | 1.64 |
| 1130 | 1130 | | | | | | 2758 | | |
| SEQ ID | COMP ID | TGGAAGTCCCTGAGACGG | 483 | 500 | 4429 | 4446 | SEQ ID | CCGTCTCAGGGACTTCCA | 1.43 |
| 1131 | 1131 | | | | | | 2759 | | |
| SEQ ID | COMP ID | ACTGGAAGTCCCTGAGAC | 485 | 502 | 4431 | 4448 | SEQ ID | GTCTCAGGGACTTCCAGT | 1.51 |
| 1132 | 1132 | | | | | | 2760 | | |
| SEQ ID | COMP ID | CAACTGGAAGTCCCTGAG | 487 | 504 | 4433 | 4450 | SEQ ID | CTCAGGGACTTCCAGTTG | 1.35 |
| 1133 | 1133 | | | | | | 2761 | | |
| SEQ ID | COMP ID | AGCAACTGGAAGTCCCTG | 489 | 506 | 4435 | 4452 | SEQ ID | CAGGGACTTCCAGTTGCT | 1.29 |
| 1134 | 1134 | | | | | | 2762 | | |
| SEQ ID | COMP ID | GCAGCAACTGGAAGTCCC | 491 | 508 | 4437 | 4454 | SEQ ID | GGGACTTCCAGTTGCTGC | 1.64 |
| 1135 | 1135 | | | | | | 2763 | | |
| SEQ ID | COMP ID | GGGCAGCAACTGGAAGTC | 493 | 510 | 4439 | 4456 | SEQ ID | GACTTCCAGTTGCTGCCC | 3.51 |
| 1136 | 1136 | | | | | | 2764 | | |
| SEQ ID | COMP ID | AGGGGCAGCAACTGGAAG | 495 | 512 | 4441 | 4458 | SEQ ID | CTTCCAGTTGCTGCCCCT | 2.93 |
| 1137 | 1137 | | | | | | 2765 | | |
| SEQ ID | COMP ID | GAAGGGGCAGCAACTGGA | 497 | 514 | 4443 | 4460 | SEQ ID | TCCAGTTGCTGCCCCTTC | 3.49 |
| 1138 | 1138 | | | | | | 2766 | | |
| SEQ ID | COMP ID | GGGAAGGGGCAGCAACTG | 499 | 516 | 4445 | 4462 | SEQ ID | CAGTTGCTGCCCCTTCCC | 3.34 |
| 1139 | 1139 | | | | | | 2767 | | |
| SEQ ID | COMP ID | CTGGGAAGGGGCAGCAAC | 501 | 518 | 4447 | 4464 | SEQ ID | GTTGCTGCCCCTTCCCAG | 3.12 |
| 1140 | 1140 | | | | | | 2768 | | |
| SEQ ID | COMP ID | CTCTGGGAAGGGGCAGCA | 503 | 520 | 4449 | 4466 | SEQ ID | TGCTGCCCCTTCCCAGAG | 2.58 |
| 1141 | 1141 | | | | | | 2769 | | |
| SEQ ID | COMP ID | ACCTCTGGGAAGGGGCAG | | | 4451 | 4468 | SEQ ID | CTGCCCCTTCCCAGAGGT | 3.04 |
| 1142 | 1142 | | | | | | 2770 | | |
| SEQ ID | COMP ID | TCACCTCTGGGAAGGGGC | | | 4453 | 4470 | SEQ ID | GCCCCTTCCCAGAGGTGA | 2.53 |
| 1143 | 1143 | | | | | | 2771 | | |
| SEQ ID | COMP ID | GCTCACCTCTGGGAAGGG | | | 4455 | 4472 | SEQ ID | CCCTTCCCAGAGGTGAGC | 1.9 |
| 1144 | 1144 | | | | | | 2772 | | |
| SEQ ID | COMP ID | ACGCTCACCTCTGGGAAG | | | 4457 | 4474 | SEQ ID | CTTCCCAGAGGTGAGCGT | 1.37 |
| 1145 | 1145 | | | | | | 2773 | | |
| SEQ ID | COMP ID | GCACGCTCACCTCTGGGA | | | 4459 | 4476 | SEQ ID | TCCCAGAGGTGAGCGTGC | 1.82 |
| 1146 | 1146 | | | | | | 2774 | | |
| SEQ ID | COMP ID | TGGCACGCTCACCTCTGG | | | 4461 | 4478 | SEQ ID | CCAGAGGTGAGCGTGCCA | 1.43 |
| 1147 | 1147 | | | | | | 2775 | | |
| SEQ ID | COMP ID | GATGGCACGCTCACCTCT | | | 4463 | 4480 | SEQ ID | AGAGGTGAGCGTGCCATC | no data |
| 1148 | 1148 | | | | | | 2776 | | |
| SEQ ID | COMP ID | CTGATGGCACGCTCACCT | | | 4465 | 4482 | SEQ ID | AGGTGAGCGTGCCATCAG | no data |
| 1149 | 1149 | | | | | | 2777 | | |
| SEQ ID | COMP ID | GGCTGATGGCACGCTCAC | | | 4467 | 4484 | SEQ ID | GTGAGCGTGCCATCAGCC | no data |
| 1150 | 1150 | | | | | | 2778 | | |
| SEQ ID | COMP ID | TGGGCTGATGGCACGCTC | | | 4469 | 4486 | SEQ ID | GAGCGTGCCATCAGCCCA | no data |
| 1151 | 1151 | | | | | | 2779 | | |
| SEQ ID | COMP ID | ACTGGGCTGATGGCACGC | | | 4471 | 4488 | SEQ ID | GCGTGCCATCAGCCCAGT | no data |
| 1152 | 1152 | | | | | | 2780 | | |
| SEQ ID | COMP ID | CCACTGGGCTGATGGCAC | | | 4473 | 4490 | SEQ ID | GTGCCATCAGCCCAGTGG | no data |
| 1153 | 1153 | | | | | | 2781 | | |
| SEQ ID | COMP ID | CTCCACTGGGCTGATGGC | | | 4475 | 4492 | SEQ ID | GCCATCAGCCCAGTGGAG | no data |
| 1154 | 1154 | | | | | | 2782 | | |
| SEQ ID | COMP ID | CCCTCCACTGGGCTGATG | | | 4477 | 4494 | SEQ ID | CATCAGCCCAGTGGAGGG | no data |
| 1155 | 1155 | | | | | | 2783 | | |
| SEQ ID | COMP ID | GCCCCTCCACTGGGCTGA | | | 4479 | 4496 | SEQ ID | TCAGCCCAGTGGAGGGGC | no data |
| 1156 | 1156 | | | | | | 2784 | | |
| SEQ ID | COMP ID | AAGCCCCTCCACTGGGCT | | | 4481 | 4498 | SEQ ID | AGCCCAGTGGAGGGGCTT | no data |
| 1157 | 1157 | | | | | | 2785 | | |
| SEQ ID | COMP ID | CTAAGCCCCTCCACTGGG | | | 4483 | 4500 | SEQ ID | CCCAGTGGAGGGGCTTAG | no data |
| 1158 | 1158 | | | | | | 2786 | | |
| SEQ ID | COMP ID | ACCTAAGCCCCTCCACTG | | | 4485 | 4502 | SEQ ID | CAGTGGAGGGGCTTAGGT | no data |
| 1159 | 1159 | | | | | | 2787 | | |
| SEQ ID | COMP ID | AGACCTAAGCCCCTCCAC | | | 4487 | 4504 | SEQ ID | GTGGAGGGGCTTAGGTCT | no data |
| 1160 | 1160 | | | | | | 2788 | | |
| SEQ ID | COMP ID | GCAGACCTAAGCCCCTCC | | | 4489 | 4506 | SEQ ID | GGAGGGGCTTAGGTCTGC | no data |
| 1161 | 1161 | | | | | | 2789 | | |
| SEQ ID | COMP ID | ATGCAGACCTAAGCCCCT | | | 4491 | 4508 | SEQ ID | AGGGGCTTAGGTCTGCAT | no data |
| 1162 | 1162 | | | | | | 2790 | | |
| SEQ ID | COMP ID | AAATGCAGACCTAAGCCC | | | 4493 | 4510 | SEQ ID | GGGCTTAGGTCTGCATTT | no data |
| 1163 | 1163 | | | | | | 2791 | | |
| SEQ ID | COMP ID | ATAAATGCAGACCTAAGC | | | 4495 | 4512 | SEQ ID | GCTTAGGTCTGCATTTAT | no data |
| 1164 | 1164 | | | | | | 2792 | | |
| SEQ ID | COMP ID | GCATAAATGCAGACCTAA | | | 4497 | 4514 | SEQ ID | TTAGGTCTGCATTTATGC | no data |
| 1165 | 1165 | | | | | | 2793 | | |
| SEQ ID | COMP ID | AAGCATAAATGCAGACCT | | | 4499 | 4516 | SEQ ID | AGGTCTGCATTTATGCTT | no data |
| 1166 | 1166 | | | | | | 2794 | | |
| SEQ ID | COMP ID | CCCTTTTATCTGCAGGTG | | | 4531 | 4548 | SEQ ID | CACCTGCAGATAAAAGGG | no data |
| 1167 | 1167 | | | | | | 2795 | | |
| SEQ ID | COMP ID | GGCCCTTTTATCTGCAGG | | | 4533 | 4550 | SEQ ID | CCTGCAGATAAAAGGGCC | no data |
| 1168 | 1168 | | | | | | 2796 | | |
| SEQ ID | COMP ID | AGGGCCCTTTTATCTGCA | | | 4535 | 4552 | SEQ ID | TGCAGATAAAAGGGCCCT | no data |
| 1169 | 1169 | | | | | | 2797 | | |
| SEQ ID | COMP ID | GCAGGGCCCTTTTATCTG | | | 4537 | 4554 | SEQ ID | CAGATAAAAGGGCCCTGC | no data |
| 1170 | 1170 | | | | | | 2798 | | |
| SEQ ID | COMP ID | TGGCAGGGCCCTTTTATC | | | 4539 | 4556 | SEQ ID | GATAAAAGGGCCCTGCCA | no data |
| 171 | 1171 | | | | | | 2799 | | |
| SEQ ID | COMP ID | ATTGGCAGGGCCCTTTTA | | | 4541 | 4558 | SEQ ID | TAAAAGGGCCCTGCCAAT | no data |
| 1172 | 1172 | | | | | | 2800 | | |
| SEQ ID | COMP ID | GCATTGGCAGGGCCCTTT | | | 4543 | 4560 | SEQ ID | AAAGGGCCCTGCCAATGC | no data |
| 1173 | 1173 | | | | | | 2801 | | |
| SEQ ID | COMP ID | CTGCATTGGCAGGGCCCT | | | 4545 | 4562 | SEQ ID | AGGGCCCTGCCAATGCAG | no data |
| 1174 | 1174 | | | | | | 2802 | | |
| SEQ ID | COMP ID | ACCTGCATTGGCAGGGCC | | | 4547 | 4564 | SEQ ID | GGCCCTGCCAATGCAGGT | no data |
| 1175 | 1175 | | | | | | 2803 | | |
| SEQ ID | COMP ID | AAACCTGCATTGGCAGGG | | | 4549 | 4566 | SEQ ID | CCCTGCCAATGCAGGTTT | no data |
| 1176 | 1176 | | | | | | 2804 | | |
| SEQ ID | COMP ID | AGAAACCTGCATTGGCAG | | | 4551 | 4568 | SEQ ID | CTGCCAATGCAGGTTTCT | no data |
| 1177 | 1177 | | | | | | 2805 | | |
| SEQ ID | COMP ID | AGAGAAACCTGCATTGGC | | | 4553 | 4570 | SEQ ID | GCCAATGCAGGTTTCTCT | no data |
| 1178 | 1178 | | | | | | 2806 | | |
| SEQ ID | COMP ID | ACAGAGAAACCTGCATTG | | | 4555 | 4572 | SEQ ID | CAATGCAGGTTTCTCTGT | no data |
| 1179 | 1179 | | | | | | 2807 | | |
| SEQ ID | COMP ID | ACACAGAGAAACCTGCAT | | | 4557 | 4574 | SEQ ID | ATGCAGGTTTCTCTGTGT | no data |
| 1180 | 1180 | | | | | | 2808 | | |
| SEQ ID | COMP ID | GAACACAGAGAAACCTGC | | | 4559 | 4576 | SEQ ID | GCAGGTTTCTCTGTGTTC | no data |
| 1181 | 1181 | | | | | | 2809 | | |
| SEQ ID | COMP ID | TGGAACACAGAGAAACCT | | | 4561 | 4578 | SEQ ID | AGGTTTCTCTGTGTTCCA | no data |
| 1182 | 1182 | | | | | | 2810 | | |
| SEQ ID | COMP ID | TGTGGAACACAGAGAAAC | | | 4563 | 4580 | SEQ ID | GTTTCTCTGTGTTCCACA | no data |
| 1183 | 1183 | | | | | | 2811 | | |
| SEQ ID | COMP ID | CCTGTGGAACACAGAGAA | | | 4565 | 4582 | SEQ ID | TTCTCTGTGTTCCACAGG | no data |
| 1184 | 1184 | | | | | | 2812 | | |
| SEQ ID | COMP ID | GGCCTGTGGAACACAGAG | | | 4567 | 4584 | SEQ ID | CTCTGTGTTCCACAGGCC | no data |
| 1185 | 1185 | | | | | | 2813 | | |
| SEQ ID | COMP ID | ACGGCCTGTGGAACACAG | | | 4569 | 4586 | SEQ ID | CTGTGTTCCACAGGCCGT | no data |
| 1186 | 1186 | | | | | | 2814 | | |
| SEQ ID | COMP ID | CCACGGCCTGTGGAACAC | | | 4571 | 4588 | SEQ ID | GTGTTCCACAGGCCGTGG | 1.25 |
| 1187 | 1187 | | | | | | 2815 | | |
| SEQ ID | COMP ID | TGCCACGGCCTGTGGAAC | | | 4573 | 4590 | SEQ ID | GTTCCACAGGCCGTGGCA | 1.69 |
| 1188 | 1188 | | | | | | 2816 | | |
| SEQ ID | COMP ID | CATGCCACGGCCTGTGGA | | | 4575 | 4592 | SEQ ID | TCCACAGGCCGTGGCATG | 1.65 |
| 1189 | 1189 | | | | | | 2817 | | |
| SEQ ID | COMP ID | CGCATGCCACGGCCTGTG | | | 4577 | 4594 | SEQ ID | CACAGGCCGTGGCATGCG | 1.91 |
| 1190 | 1190 | | | | | | 2818 | | |
| SEQ ID | COMP ID | CCCGCATGCCACGGCCTG | | | 4579 | 4596 | SEQ ID | CAGGCCGTGGCATGCGGG | 1.81 |
| 1191 | 1191 | | | | | | 2819 | | |
| SEQ ID | COMP ID | TCCCCGCATGCCACGGCC | 520 | 537 | 4581 | 4598 | SEQ ID | GGCCGTGGCATGCGGGGA | 1.63 |
| 1192 | 1192 | | | | | | 2820 | | |
| SEQ ID | COMP ID | CATCCCCGCATGCCACGG | 522 | 539 | 4583 | 4600 | SEQ ID | CCGTGGCATGCGGGGATG | 1.05 |
| 1193 | 1193 | | | | | | 2821 | | |
| SEQ ID | COMP ID | GCCATCCCCGCATGCCAC | 524 | 541 | 4585 | 4602 | SEQ ID | GTGGCATGCGGGGATGGC | 1.05 |
| 1194 | 1194 | | | | | | 2822 | | |
| SEQ ID | COMP ID | TGGCCATCCCCGCATGCC | 526 | 543 | 4587 | 4604 | SEQ ID | GGCATGCGGGGATGGCCA | 1.37 |
| 1195 | 1195 | | | | | | 2823 | | |
| SEQ ID | COMP ID | GATGGCCATCCCCGCATG | 528 | 545 | 4589 | 4606 | SEQ ID | CATGCGGGGATGGCCATC | 1.58 |
| 1196 | 1196 | | | | | | 2824 | | |
| SEQ ID | COMP ID | GTGATGGCCATCCCCGCA | 530 | 547 | 4591 | 4608 | SEQ ID | TGCGGGGATGGCCATCAC | 1.23 |
| 1197 | 1197 | | | | | | 2825 | | |
| SEQ ID | COMP ID | CAGTGATGGCCATCCCCG | 532 | 549 | 4593 | 4610 | SEQ ID | CGGGGATGGCCATCACTG | 1.46 |
| 1198 | 1198 | | | | | | 2826 | | |
| SEQ ID | COMP ID | AGCAGTGATGGCCATCCC | 534 | 551 | 4595 | 4612 | SEQ ID | GGGATGGCCATCACTGCT | 1.3 |
| 1199 | 1199 | | | | | | 2827 | | |
| SEQ ID | COMP ID | GCAGCAGTGATGGCCATC | 536 | 553 | 4597 | 4614 | SEQ ID | GATGGCCATCACTGCTGC | 2.46 |
| 1200 | 1200 | | | | | | 2828 | | |
| SEQ ID | COMP ID | GGGCAGCAGTGATGGCCA | 538 | 555 | 4599 | 4616 | SEQ ID | TGGCCATCACTGCTGCCC | 1.74 |
| 1201 | 1201 | | | | | | 2829 | | |
| SEQ ID | COMP ID | GTGGGCAGCAGTGATGGC | 540 | 557 | 4601 | 4618 | SEQ ID | GCCATCACTGCTGCCCAC | 1.59 |
| 1202 | 1202 | | | | | | 2830 | | |
| SEQ ID | COMP ID | CCGTGGGCAGCAGTGATG | 542 | 559 | 4603 | 4620 | SEQ ID | CATCACTGCTGCCCACGG | 1.66 |
| 1203 | 1203 | | | | | | 2831 | | |
| SEQ ID | COMP ID | CCCCGTGGGCAGCAGTGA | 544 | 561 | 4605 | 4622 | SEQ ID | TCACTGCTGCCCACGGGG | 1.52 |
| 1204 | 1204 | | | | | | 2832 | | |
| SEQ ID | COMP ID | AGCCCCGTGGGCAGCAGT | 546 | 563 | 4607 | 4624 | SEQ ID | ACTGCTGCCCACGGGGCT | 1.53 |
| 1205 | 1205 | | | | | | 2833 | | |
| SEQ ID | COMP ID | GAAGCCCCGTGGGCAGCA | 548 | 565 | 4609 | 4626 | SEQ ID | TGCTGCCCACGGGGCTTC | 1.66 |
| 1206 | 1206 | | | | | | 2834 | | |
| SEQ ID | COMP ID | TGGAAGCCCCGTGGGCAG | 550 | 567 | 4611 | 4628 | SEQ ID | CTGCCCACGGGGCTTCCA | 2.45 |
| 1207 | 1207 | | | | | | 2835 | | |
| SEQ ID | COMP ID | AGTGGAAGCCCCGTGGGC | 552 | 569 | 4613 | 4630 | SEQ ID | GCCCACGGGGCTTCCACT | 1.72 |
| 1208 | 1208 | | | | | | 2836 | | |
| SEQ ID | COMP ID | GCAGTGGAAGCCCCGTGG | 554 | 571 | 4615 | 4632 | SEQ ID | CCACGGGGCTTCCACTGC | 1.98 |
| 1209 | 1209 | | | | | | 2837 | | |
| SEQ ID | COMP ID | CTGCAGTGGAAGCCCCGT | 556 | 573 | 4617 | 4634 | SEQ ID | ACGGGGCTTCCACTGCAG | 1.48 |
| 1210 | 1210 | | | | | | 2838 | | |
| SEQ ID | COMP ID | CACTGCAGTGGAAGCCCC | 558 | 575 | 4619 | 4636 | SEQ ID | GGGGCTTCCACTGCAGTG | 1.31 |
| 1211 | 1211 | | | | | | 2839 | | |
| SEQ ID | COMP ID | TGCACTGCAGTGGAAGCC | 560 | 577 | 4621 | 4638 | SEQ ID | GGCTTCCACTGCAGTGCA | 1.42 |
| 1212 | 1212 | | | | | | 2840 | | |
| SEQ ID | COMP ID | TCTGCACTGCAGTGGAAG | 562 | 579 | 4623 | 4640 | SEQ ID | CTTCCACTGCAGTGCAGA | 1.3 |
| 1213 | 1213 | | | | | | 2841 | | |
| SEQ ID | COMP ID | CGTCTGCACTGCAGTGGA | 564 | 581 | 4625 | 4642 | SEQ ID | TCCACTGCAGTGCAGACG | 1.35 |
| 1214 | 1214 | | | | | | 2842 | | |
| SEQ ID | COMP ID | CCCGTCTGCACTGCAGTG | 566 | 583 | 4627 | 4644 | SEQ ID | CACTGCAGTGCAGACGGG | 1.12 |
| 1215 | 1215 | | | | | | 2843 | | |
| SEQ ID | COMP ID | CGCCCGTCTGCACTGCAG | 568 | 585 | 4629 | 4646 | SEQ ID | CTGCAGTGCAGACGGGCG | 1.03 |
| 1216 | 1216 | | | | | | 2844 | | |
| SEQ ID | COMP ID | ATCGCCCGTCTGCACTGC | 570 | 587 | 4631 | 4648 | SEQ ID | GCAGTGCAGACGGGCGAT | 1.05 |
| 1217 | 1217 | | | | | | 2845 | | |
| SEQ ID | COMP ID | GGATCGCCCGTCTGCACT | 572 | 589 | 4633 | 4650 | SEQ ID | AGTGCAGACGGGCGATCC | 0.93 |
| 1218 | 1218 | | | | | | 2846 | | |
| SEQ ID | COMP ID | CAGGATCGCCCGTCTGCA | 574 | 591 | 4635 | 4652 | SEQ ID | TGCAGACGGGCGATCCTG | 1.17 |
| 1219 | 1219 | | | | | | 2847 | | |
| SEQ ID | COMP ID | AGCAGGATCGCCCGTCTG | 576 | 593 | 4637 | 4654 | SEQ ID | CAGACGGGCGATCCTGCT | 1.2 |
| 1220 | 1220 | | | | | | 2848 | | |
| SEQ ID | COMP ID | GAAGCAGGATCGCCCGTC | 578 | 595 | 4639 | 4656 | SEQ ID | GACGGGCGATCCTGCTTC | 1.4 |
| 1221 | 1221 | | | | | | 2849 | | |
| SEQ ID | COMP ID | TGGAAGCAGGATCGCCCG | 580 | 597 | 4641 | 4658 | SEQ ID | CGGGCGATCCTGCTTCCA | 1.46 |
| 1222 | 1222 | | | | | | 2850 | | |
| SEQ ID | COMP ID | TTTGGAAGCAGGATCGCC | 582 | 599 | 4643 | 4660 | SEQ ID | GGCGATCCTGCTTCCAAA | 1.55 |
| 1223 | 1223 | | | | | | 2851 | | |
| SEQ ID | COMP ID | TCTTTGGAAGCAGGATCG | 584 | 601 | 4645 | 4662 | SEQ ID | CGATCCTGCTTCCAAAGA | 1.62 |
| 1224 | 1224 | | | | | | 2852 | | |
| SEQ ID | COMP ID | GATCTTTGGAAGCAGGAT | 586 | 603 | 4647 | 4664 | SEQ ID | ATCCTGCTTCCAAAGATC | 1.44 |
| 1225 | 1225 | | | | | | 2853 | | |
| SEQ ID | COMP ID | CTGATCTTTGGAAGCAGG | 588 | 605 | 4649 | 4666 | SEQ ID | CCTGCTTCCAAAGATCAG | 1.13 |
| 1226 | 1226 | | | | | | 2854 | | |
| SEQ ID | COMP ID | ACCCACACCCCAGCTGCA | | | 4668 | 4685 | SEQ ID | TGCAGCTGGGGTGTGGGT | 1.22 |
| 1227 | 1227 | | | | | | 2855 | | |
| SEQ ID | COMP ID | GCACCCACACCCCAGCTG | | | 4670 | 4687 | SEQ ID | CAGCTGGGGTGTGGGTGC | 0.93 |
| 1228 | 1228 | | | | | | 2856 | | |
| SEQ ID | COMP ID | CTGCACCCACACCCCAGC | | | 4672 | 4689 | SEQ ID | GCTGGGGTGTGGGTGCAG | 0.89 |
| 1229 | 1229 | | | | | | 2857 | | |
| SEQ ID | COMP ID | CCCTGCACCCACACCCCA | | | 4674 | 4691 | SEQ ID | TGGGGTGTGGGTGCAGGG | 1.04 |
| 1230 | 1230 | | | | | | 2858 | | |
| SEQ ID | COMP ID | TGCCCTGCACCCACACCC | | | 4676 | 4693 | SEQ ID | GGGTGTGGGTGCAGGGCA | 1.04 |
| 1231 | 1231 | | | | | | 2859 | | |
| SEQ ID | COMP ID | CCTGCCCTGCACCCACAC | | | 4678 | 4695 | SEQ ID | GTGTGGGTGCAGGGCAGG | 1.22 |
| 1232 | 1232 | | | | | | 2860 | | |
| SEQ ID | COMP ID | TGCCTGCCCTGCACCCAC | | | 4680 | 4697 | SEQ ID | GTGGGTGCAGGGCAGGCA | 1.14 |
| 1233 | 1233 | | | | | | 2861 | | |
| SEQ ID | COMP ID | TCTGCCTGCCCTGCACCC | | | 4682 | 4699 | SEQ ID | GGGTGCAGGGCAGGCAGA | 1.19 |
| 1234 | 1234 | | | | | | 2862 | | |
| SEQ ID | COMP ID | CGTCTGCCTGCCCTGCAC | | | 4684 | 4701 | SEQ ID | GTGCAGGGCAGGCAGACG | 1.42 |
| 1235 | 1235 | | | | | | 2863 | | |
| SEQ ID | COMP ID | CCCGTCTGCCTGCCCTGC | | | 4686 | 4703 | SEQ ID | GCAGGGCAGGCAGACGGG | 1.09 |
| 1236 | 1236 | | | | | | 2864 | | |
| SEQ ID | COMP ID | TGCCCGTCTGCCTGCCCT | | | 4688 | 4705 | SEQ ID | AGGGCAGGCAGACGGGCA | 1.27 |
| 1237 | 1237 | | | | | | 2865 | | |
| SEQ ID | COMP ID | GCTGCCCGTCTGCCTGCC | | | 4690 | 4707 | SEQ ID | GGCAGGCAGACGGGCAGC | 1.56 |
| 1238 | 1238 | | | | | | 2866 | | |
| SEQ ID | COMP ID | ATGCTGCCCGTCTGCCTG | | | 4692 | 4709 | SEQ ID | CAGGCAGACGGGCAGCAT | 1.38 |
| 1239 | 1239 | | | | | | 2867 | | |
| SEQ ID | COMP ID | CCACATGCTGCCCGTCTG | | | 4696 | 4713 | SEQ ID | CAGACGGGCAGCATGTGG | 1.1 |
| 1240 | 1240 | | | | | | 2868 | | |
| SEQ ID | COMP ID | CTCCACATGCTGCCCGTC | | | 4698 | 4715 | SEQ ID | GACGGGCAGCATGTGGAG | 1.18 |
| 1241 | 1241 | | | | | | 2869 | | |
| SEQ ID | COMP ID | GACTCCACATGCTGCCCG | | | 4700 | 4717 | SEQ ID | CGGGCAGCATGTGGAGTC | 1.42 |
| 1242 | 1242 | | | | | | 2870 | | |
| SEQ ID | COMP ID | CCACTCAGGGAAGGTGAC | | | 5093 | 5110 | SEQ ID | GTCACCTTCCCTGAGTGG | 1.78 |
| 1243 | 1243 | | | | | | 2871 | | |
| SEQ ID | COMP ID | GCCCACTCAGGGAAGGTG | | | 5095 | 5112 | SEQ ID | CACCTTCCCTGAGTGGGC | 1.68 |
| 1244 | 1244 | | | | | | 2872 | | |
| SEQ ID | COMP ID | CAGCCCACTCAGGGAAGG | | | 5097 | 5114 | SEQ ID | CCTTCCCTGAGTGGGCTG | 1.15 |
| 1245 | 1245 | | | | | | 2873 | | |
| SEQ ID | COMP ID | ACCAGCCCACTCAGGGAA | | | 5099 | 5116 | SEQ ID | TTCCCTGAGTGGGCTGGT | 1 |
| 1246 | 1246 | | | | | | 2874 | | |
| SEQ ID | COMP ID | CTACCAGCCCACTCAGGG | | | 5101 | 5118 | SEQ ID | CCCTGAGTGGGCTGGTAG | 1.14 |
| 1247 | 1247 | | | | | | 2875 | | |
| SEQ ID | COMP ID | TACTACCAGCCCACTCAG | | | 5103 | 5120 | SEQ ID | CTGAGTGGGCTGGTAGTA | 1.14 |
| 1248 | 1248 | | | | | | 2876 | | |
| SEQ ID | COMP ID | GATACTACCAGCCCACTC | | | 5105 | 5122 | SEQ ID | GAGTGGGCTGGTAGTATC | no data |
| 1249 | 1249 | | | | | | 2877 | | |
| SEQ ID | COMP ID | AGGATACTACCAGCCCAC | | | 5107 | 5124 | SEQ ID | GTGGGCTGGTAGTATCCT | 1.23 |
| 1250 | 1250 | | | | | | 2878 | | |
| SEQ ID | COMP ID | CCAGGATACTACCAGCCC | | | 5109 | 5126 | SEQ ID | GGGCTGGTAGTATCCTGG | 1.2 |
| 1251 | 1251 | | | | | | 2879 | | |
| SEQ ID | COMP ID | ACCCAGGATACTACCAGC | | | 5111 | 5128 | SEQ ID | GCTGGTAGTATCCTGGGT | 1.08 |
| 1252 | 1252 | | | | | | 2880 | | |
| SEQ ID | COMP ID | TGACCCAGGATACTACCA | | | 5113 | 5130 | SEQ ID | TGGTAGTATCCTGGGTCA | 1.16 |
| 1253 | 1253 | | | | | | 2881 | | |
| SEQ ID | COMP ID | GATGACCCAGGATACTAC | | | 5115 | 5132 | SEQ ID | GTAGTATCCTGGGTCATC | 1.26 |
| 1254 | 1254 | | | | | | 2882 | | |
| SEQ ID | COMP ID | AAGATGACCCAGGATACT | | | 5117 | 5134 | SEQ ID | AGTATCCTGGGTCATCTT | 1.16 |
| 1255 | 1255 | | | | | | 2883 | | |
| SEQ ID | COMP ID | ACAAGATGACCCAGGATA | | | 5119 | 5136 | SEQ ID | TATCCTGGGTCATCTTGT | 1.17 |
| 1256 | 1256 | | | | | | 2884 | | |
| SEQ ID | COMP ID | GGACAAGATGACCCAGGA | | | 5121 | 5138 | SEQ ID | TCCTGGGTCATCTTGTCC | 1.3 |
| 1257 | 1257 | | | | | | 2885 | | |
| SEQ ID | COMP ID | GTGGACAAGATGACCCAG | | | 5123 | 5140 | SEQ ID | CTGGGTCATCTTGTCCAC | 1.5 |
| 1258 | 1258 | | | | | | 2886 | | |
| SEQ ID | COMP ID | CTGTGGACAAGATGACCC | | | 5125 | 5142 | SEQ ID | GGGTCATCTTGTCCACAG | 1.6 |
| 1259 | 1259 | | | | | | 2887 | | |
| SEQ ID | COMP ID | ACCTGTGGACAAGATGAC | | | 5127 | 5144 | SEQ ID | GTCATCTTGTCCACAGGT | 1.21 |
| 1260 | 1260 | | | | | | 2888 | | |
| SEQ ID | COMP ID | TTACCTGTGGACAAGATG | | | 5129 | 5146 | SEQ ID | CATCTTGTCCACAGGTAA | 1.22 |
| 1261 | 1261 | | | | | | 2889 | | |
| SEQ ID | COMP ID | TGTTACCTGTGGACAAGA | | | 5131 | 5148 | SEQ ID | TCTTGTCCACAGGTAACA | 1.69 |
| 1262 | 1262 | | | | | | 2890 | | |
| SEQ ID | COMP ID | GTTGTTACCTGTGGACAA | | | 5133 | 5150 | SEQ ID | TTGTCCACAGGTAACAAC | 1.6 |
| 1263 | 1263 | | | | | | 2891 | | |
| SEQ ID | COMP ID | GAGTTGTTACCTGTGGAC | | | 5135 | 5152 | SEQ ID | GTCCACAGGTAACAACTC | 1.93 |
| 1264 | 1264 | | | | | | 2892 | | |
| SEQ ID | COMP ID | CGGAGTTGTTACCTGTGG | | | 5137 | 5154 | SEQ ID | CCACAGGTAACAACTCCG | 1.48 |
| 1265 | 1265 | | | | | | 2893 | | |
| SEQ ID | COMP ID | CACGGAGTTGTTACCTGT | | | 5139 | 5156 | SEQ ID | ACAGGTAACAACTCCGTG | 1.41 |
| 1266 | 1266 | | | | | | 2894 | | |
| SEQ ID | COMP ID | CCCACGGAGTTGTTACCT | 604 | 621 | 5141 | 5158 | SEQ ID | AGGTAACAACTCCGTGGG | 1.52 |
| 1267 | 1267 | | | | | | 2895 | | |
| SEQ ID | COMP ID | CACCCACGGAGTTGTTAC | 606 | 623 | 5143 | 5160 | SEQ ID | GTAACAACTCCGTGGGTG | 1.74 |
| 1268 | 1268 | | | | | | 2896 | | |
| SEQ ID | COMP ID | GGCACCCACGGAGTTGTT | 608 | 625 | 5145 | 5162 | SEQ ID | AACAACTCCGTGGGTGCC | 1.22 |
| 1269 | 1269 | | | | | | 2897 | | |
| SEQ ID | COMP ID | ATGGCACCCACGGAGTTG | 610 | 627 | 5147 | 5164 | SEQ ID | CAACTCCGTGGGTGCCAT | 1.21 |
| 1270 | 1270 | | | | | | 2898 | | |
| SEQ ID | COMP ID | GGATGGCACCCACGGAGT | 612 | 629 | 5149 | 5166 | SEQ ID | ACTCCGTGGGTGCCATCC | 1.9 |
| 1271 | 1271 | | | | | | 2899 | | |
| SEQ ID | COMP ID | CTGGATGGCACCCACGGA | 614 | 631 | 5151 | 5168 | SEQ ID | TCCGTGGGTGCCATCCAG | 1.3 |
| 1272 | 1272 | | | | | | 2900 | | |
| SEQ ID | COMP ID | CACTGGATGGCACCCACG | 616 | 633 | 5153 | 5170 | SEQ ID | CGTGGGTGCCATCCAGTG | 1.16 |
| 1273 | 1273 | | | | | | 2901 | | |
| SEQ ID | COMP ID | GGCACTGGATGGCACCCA | 618 | 635 | 5155 | 5172 | SEQ ID | TGGGTGCCATCCAGTGCC | 1.31 |
| 1274 | 1274 | | | | | | 2902 | | |
| SEQ ID | COMP ID | AGGGCACTGGATGGCACC | 620 | 637 | 5157 | 5174 | SEQ ID | GGTGCCATCCAGTGCCCT | 1.49 |
| 1275 | 1275 | | | | | | 2903 | | |
| SEQ ID | COMP ID | TCAGGGCACTGGATGGCA | 622 | 639 | 5159 | 5176 | SEQ ID | TGCCATCCAGTGCCCTGA | 1.7 |
| 1276 | 1276 | | | | | | 2904 | | |
| SEQ ID | COMP ID | TATCAGGGCACTGGATGG | 624 | 641 | 5161 | 5178 | SEQ ID | CCATCCAGTGCCCTGATA | 1.04 |
| 1277 | 1277 | | | | | | 2905 | | |
| SEQ ID | COMP ID | ACTATCAGGGCACTGGAT | 626 | 643 | 5163 | 5180 | SEQ ID | ATCCAGTGCCCTGATAGT | 1.19 |
| 1278 | 1278 | | | | | | 2906 | | |
| SEQ ID | COMP ID | TGACTATCAGGGCACTGG | 628 | 645 | 5165 | 5182 | SEQ ID | CCAGTGCCCTGATAGTCA | 1.18 |
| 1279 | 1279 | | | | | | 2907 | | |
| SEQ ID | COMP ID | ACTGACTATCAGGGCACT | 630 | 647 | 5167 | 5184 | SEQ ID | AGTGCCCTGATAGTCAGT | 1.04 |
| 1280 | 1280 | | | | | | 2908 | | |
| SEQ ID | COMP ID | GAACTGACTATCAGGGCA | 632 | 649 | 5169 | 5186 | SEQ ID | TGCCCTGATAGTCAGTTC | 1.08 |
| 1281 | 1281 | | | | | | 2909 | | |
| SEQ ID | COMP ID | TCGAACTGACTATCAGGG | 634 | 651 | 5171 | 5188 | SEQ ID | CCCTGATAGTCAGTTCGA | 1.59 |
| 1282 | 1282 | | | | | | 2910 | | |
| SEQ ID | COMP ID | ATTCGAACTGACTATCAG | 636 | 653 | 5173 | 5190 | SEQ ID | CTGATAGTCAGTTCGAAT | 1.64 |
| 1283 | 1283 | | | | | | 2911 | | |
| SEQ ID | COMP ID | GCATTCGAACTGACTATC | 638 | 655 | 5175 | 5192 | SEQ ID | GATAGTCAGTTCGAATGC | 1.67 |
| 1284 | 1284 | | | | | | 2912 | | |
| SEQ ID | COMP ID | GGGCATTCGAACTGACTA | 640 | 657 | 5177 | 5194 | SEQ ID | TAGTCAGTTCGAATGCCC | 1.55 |
| 1285 | 1285 | | | | | | 2913 | | |
| SEQ ID | COMP ID | CCGGGCATTCGAACTGAC | 642 | 659 | 5179 | 5196 | SEQ ID | GTCAGTTCGAATGCCCGG | 1.81 |
| 1286 | 1286 | | | | | | 2914 | | |
| SEQ ID | COMP ID | GTCCGGGCATTCGAACTG | 644 | 661 | 5181 | 5198 | SEQ ID | CAGTTCGAATGCCCGGAC | 1.09 |
| 1287 | 1287 | | | | | | 2915 | | |
| SEQ ID | COMP ID | AAGTCCGGGCATTCGAAC | 646 | 663 | 5183 | 5200 | SEQ ID | GTTCGAATGCCCGGACTT | 1.62 |
| 1288 | 1288 | | | | | | 2916 | | |
| SEQ ID | COMP ID | AGAAGTCCGGGCATTCGA | 648 | 665 | 5185 | 5202 | SEQ ID | TCGAATGCCCGGACTTCT | 1.48 |
| 1289 | 1289 | | | | | | 2917 | | |
| SEQ ID | COMP ID | GGAGAAGTCCGGGCATTC | 650 | 667 | 5187 | 5204 | SEQ ID | GAATGCCCGGACTTCTCC | 1.8 |
| 1290 | 1290 | | | | | | 2918 | | |
| SEQ ID | COMP ID | GTGGAGAAGTCCGGGCAT | 652 | 669 | 5189 | 5206 | SEQ ID | ATGCCCGGACTTCTCCAC | 2.43 |
| 1291 | 1291 | | | | | | 2919 | | |
| SEQ ID | COMP ID | ACGTGGAGAAGTCCGGGC | 654 | 671 | 5191 | 5208 | SEQ ID | GCCCGGACTTCTCCACGT | 1.93 |
| 1292 | 1292 | | | | | | 2920 | | |
| SEQ ID | COMP ID | GCACGTGGAGAAGTCCGG | 656 | 673 | 5193 | 5210 | SEQ ID | CCGGACTTCTCCACGTGC | 1.44 |
| 1293 | 1293 | | | | | | 2921 | | |
| SEQ ID | COMP ID | CAGCACGTGGAGAAGTCC | 658 | 675 | 5195 | 5212 | SEQ ID | GGACTTCTCCACGTGCTG | 1.71 |
| 1294 | 1294 | | | | | | 2922 | | |
| SEQ ID | COMP ID | CACAGCACGTGGAGAAGT | 660 | 677 | 5197 | 5214 | SEQ ID | ACTTCTCCACGTGCTGTG | 1.2 |
| 1295 | 1295 | | | | | | 2923 | | |
| SEQ ID | COMP ID | AACACAGCACGTGGAGAA | 662 | 679 | 5199 | 5216 | SEQ ID | TTCTCCACGTGCTGTGTT | 1.39 |
| 1296 | 1296 | | | | | | 2924 | | |
| SEQ ID | COMP ID | ATAACACAGCACGTGGAG | 664 | 681 | 5201 | 5218 | SEQ ID | CTCCACGTGCTGTGTTAT | 1.51 |
| 1297 | 1297 | | | | | | 2925 | | |
| SEQ ID | COMP ID | CCATAACACAGCACGTGG | 666 | 683 | 5203 | 5220 | SEQ ID | CCACGTGCTGTGTTATGG | 1.78 |
| 1298 | 1298 | | | | | | 2926 | | |
| SEQ ID | COMP ID | GACCATAACACAGCACGT | 668 | 685 | 5205 | 5222 | SEQ ID | ACGTGCTGTGTTATGGTC | 1.22 |
| 1299 | 1299 | | | | | | 2927 | | |
| SEQ ID | COMP ID | TCGACCATAACACAGCAC | 670 | 687 | 5207 | 5224 | SEQ ID | GTGCTGTGTTATGGTCGA | 1.16 |
| 1300 | 1300 | | | | | | 2928 | | |
| SEQ ID | COMP ID | CATCGACCATAACACAGC | 672 | 689 | 5209 | 5226 | SEQ ID | GCTGTGTTATGGTCGATG | 1.06 |
| 1301 | 1301 | | | | | | 2929 | | |
| SEQ ID | COMP ID | GCCATCGACCATAACACA | 674 | 691 | 5211 | 5228 | SEQ ID | TGTGTTATGGTCGATGGC | 1.14 |
| 1302 | 1302 | | | | | | 2930 | | |
| SEQ ID | COMP ID | GAGCCATCGACCATAACA | 676 | 693 | 5213 | 5230 | SEQ ID | TGTTATGGTCGATGGCTC | 1.29 |
| 1303 | 1303 | | | | | | 2931 | | |
| SEQ ID | COMP ID | AGGAGCCATCGACCATAA | 678 | 695 | 5215 | 5232 | SEQ ID | TTATGGTCGATGGCTCCT | 1.52 |
| 1304 | 1304 | | | | | | 2932 | | |
| SEQ ID | COMP ID | CCAGGAGCCATCGACCAT | 680 | 697 | 5217 | 5234 | SEQ ID | ATGGTCGATGGCTCCTGG | 0.81 |
| 1305 | 1305 | | | | | | 2933 | | |
| SEQ ID | COMP ID | CCCCAGGAGCCATCGACC | 682 | 699 | 5219 | 5236 | SEQ ID | GGTCGATGGCTCCTGGGG | 1.3 |
| 1306 | 1306 | | | | | | 2934 | | |
| SEQ ID | COMP ID | ACCCCCAGGAGCCATCGA | 684 | 701 | 5221 | 5238 | SEQ ID | TCGATGGCTCCTGGGGGT | 1.46 |
| 1307 | 1307 | | | | | | 2935 | | |
| SEQ ID | COMP ID | GCACCCCCAGGAGCCATC | 686 | 703 | 5223 | 5240 | SEQ ID | GATGGCTCCTGGGGGTGC | 1.19 |
| 1308 | 1308 | | | | | | 2936 | | |
| SEQ ID | COMP ID | CAGCACCCCCAGGAGCCA | 688 | 705 | 5225 | 5242 | SEQ ID | TGGCTCCTGGGGGTGCTG | 1.2 |
| 1309 | 1309 | | | | | | 2937 | | |
| SEQ ID | COMP ID | GGCAGCACCCCCAGGAGC | 690 | 707 | 5227 | 5244 | SEQ ID | GCTCCTGGGGGTGCTGCC | 1.22 |
| 1310 | 1310 | | | | | | 2938 | | |
| SEQ ID | COMP ID | GGGGCAGCACCCCCAGGA | 692 | 709 | 5229 | 5246 | SEQ ID | TCCTGGGGGTGCTGCCCC | 1.61 |
| 1311 | 1311 | | | | | | 2939 | | |
| SEQ ID | COMP ID | ATGGGGCAGCACCCCCAG | 694 | 711 | 5231 | 5248 | SEQ ID | CTGGGGGTGCTGCCCCAT | 1.3 |
| 1312 | 1312 | | | | | | 2940 | | |
| SEQ ID | COMP ID | GCATGGGGCAGCACCCCC | 696 | 713 | 5233 | 5250 | SEQ ID | GGGGGTGCTGCCCCATGC | 1.9 |
| 1313 | 1313 | | | | | | 2941 | | |
| SEQ ID | COMP ID | GGGCATGGGGCAGCACCC | 698 | 715 | 5235 | 5252 | SEQ ID | GGGTGCTGCCCCATGCCC | 2.75 |
| 1314 | 1314 | | | | | | 2942 | | |
| SEQ ID | COMP ID | TGGGGCATGGGGCAGCAC | 700 | 717 | 5237 | 5254 | SEQ ID | GTGCTGCCCCATGCCCCA | 2.3 |
| 1315 | 1315 | | | | | | 2943 | | |
| SEQ ID | COMP ID | TCTCCCCCAGATTTGTAC | | | 5256 | 5273 | SEQ ID | GTACAAATCTGGGGGAGA | 1.34 |
| 1316 | 1316 | | | | | | 2944 | | |
| SEQ ID | COMP ID | CATCTCCCCCAGATTTGT | | | 5258 | 5275 | SEQ ID | ACAAATCTGGGGGAGATG | 1.28 |
| 1317 | 1317 | | | | | | 2945 | | |
| SEQ ID | COMP ID | CCCATCTCCCCCAGATTT | | | 5260 | 5277 | SEQ ID | AAATCTGGGGGAGATGGG | 1.33 |
| 1318 | 1318 | | | | | | 2946 | | |
| SEQ ID | COMP ID | CCCCCATCTCCCCCAGAT | | | 5262 | 5279 | SEQ ID | ATCTGGGGGAGATGGGGG | 1.32 |
| 1319 | 1319 | | | | | | 2947 | | |
| SEQ ID | COMP ID | TACCCCCATCTCCCCCAG | | | 5264 | 5281 | SEQ ID | CTGGGGGAGATGGGGGTA | 1.04 |
| 1320 | 1320 | | | | | | 2948 | | |
| SEQ ID | COMP ID | CATACCCCCATCTCCCCC | | | 5266 | 5283 | SEQ ID | GGGGGAGATGGGGGTATG | 1.02 |
| 1321 | 1321 | | | | | | 2949 | | |
| SEQ ID | COMP ID | CACATACCCCCATCTCCC | | | 5268 | 5285 | SEQ ID | GGGAGATGGGGGTATGTG | 1.05 |
| 1322 | 1322 | | | | | | 2950 | | |
| SEQ ID | COMP ID | TCCACATACCCCCATCTC | | | 5270 | 5287 | SEQ ID | GAGATGGGGGTATGTGGA | 1.05 |
| 1323 | 1323 | | | | | | 2951 | | |
| SEQ ID | COMP ID | CCTCCACATACCCCCATC | | | 5272 | 5289 | SEQ ID | GATGGGGGTATGTGGAGG | 0.77 |
| 1324 | 1324 | | | | | | 2952 | | |
| SEQ ID | COMP ID | TCCCTCCACATACCCCCA | | | 5274 | 5291 | SEQ ID | TGGGGGTATGTGGAGGGA | 1.25 |
| 1325 | 1325 | | | | | | 2953 | | |
| SEQ ID | COMP ID | CTTCCCTCCACATACCCC | | | 5276 | 5293 | SEQ ID | GGGGTATGTGGAGGGAAG | 1.03 |
| 1326 | 1326 | | | | | | 2954 | | |
| SEQ ID | COMP ID | CACTTCCCTCCACATACC | | | 5278 | 5295 | SEQ ID | GGTATGTGGAGGGAAGTG | 1.29 |
| 1327 | 1327 | | | | | | 2955 | | |
| SEQ ID | COMP ID | CCCACTTCCCTCCACATA | | | 5280 | 5297 | SEQ ID | TATGTGGAGGGAAGTGGG | 1.07 |
| 1328 | 1328 | | | | | | 2956 | | |
| SEQ ID | COMP ID | CCCCCACTTCCCTCCACA | | | 5282 | 5299 | SEQ ID | TGTGGAGGGAAGTGGGGG | 1.21 |
| 1329 | 1329 | | | | | | 2957 | | |
| SEQ ID | COMP ID | TGCCCCCACTTCCCTCCA | | | 5284 | 5301 | SEQ ID | TGGAGGGAAGTGGGGGCA | 1.12 |
| 1330 | 1330 | | | | | | 2958 | | |
| SEQ ID | COMP ID | TCTGCCCCCACTTCCCTC | | | 5286 | 5303 | SEQ ID | GAGGGAAGTGGGGGCAGA | 0.97 |
| 1331 | 1331 | | | | | | 2959 | | |
| SEQ ID | COMP ID | ACTCTGCCCCCACTTCCC | | | 5288 | 5305 | SEQ ID | GGGAAGTGGGGGCAGAGT | 1.08 |
| 1332 | 1332 | | | | | | 2960 | | |
| SEQ ID | COMP ID | CCCTGCCCCTGGCCCCCA | | | 5306 | 5323 | SEQ ID | TGGGGGCCAGGGGCAGGG | 1.31 |
| 1333 | 1333 | | | | | | 2961 | | |
| SEQ ID | COMP ID | CCCCCTGCCCCTGGCCCC | | | 5308 | 5325 | SEQ ID | GGGGCCAGGGGCAGGGGG | 0.97 |
| 1334 | 1334 | | | | | | 2962 | | |
| SEQ ID | COMP ID | CACCCCCTGCCCCTGGCC | | | 5310 | 5327 | SEQ ID | GGCCAGGGGCAGGGGGTG | 1.29 |
| 1335 | 1335 | | | | | | 2963 | | |
| SEQ ID | COMP ID | TTCACCCCCTGCCCCTGG | | | 5312 | 5329 | SEQ ID | CCAGGGGCAGGGGGTGAA | 1.28 |
| 1336 | 1336 | | | | | | 2964 | | |
| SEQ ID | COMP ID | TCTTCACCCCCTGCCCCT | | | 5314 | 5331 | SEQ ID | AGGGGCAGGGGGTGAAGA | 1.07 |
| 1337 | 1337 | | | | | | 2965 | | |
| SEQ ID | COMP ID | CGTCTTCACCCCCTGCCC | | | 5316 | 5333 | SEQ ID | GGGCAGGGGGTGAAGACG | 1.05 |
| 1338 | 1338 | | | | | | 2966 | | |
| SEQ ID | COMP ID | TCCGTCTTCACCCCCTGC | | | 5318 | 5335 | SEQ ID | GCAGGGGGTGAAGACGGA | 1 |
| 1339 | 1339 | | | | | | 2967 | | |
| SEQ ID | COMP ID | ACTCCGTCTTCACCCCCT | | | 5320 | 5337 | SEQ ID | AGGGGGTGAAGACGGAGT | no data |
| 1340 | 1340 | | | | | | 2968 | | |
| SEQ ID | COMP ID | TGACTCCGTCTTCACCCC | | | 5322 | 5339 | SEQ ID | GGGGTGAAGACGGAGTCA | 1.14 |
| 1341 | 1341 | | | | | | 2969 | | |
| SEQ ID | COMP ID | CCTGACTCCGTCTTCACC | | | 5324 | 5341 | SEQ ID | GGTGAAGACGGAGTCAGG | 1.14 |
| 1342 | 1342 | | | | | | 2970 | | |
| SEQ ID | COMP ID | GTCCTGACTCCGTCTTCA | | | 5326 | 5343 | SEQ ID | TGAAGACGGAGTCAGGAC | 1.38 |
| 1343 | 1343 | | | | | | 2971 | | |
| SEQ ID | COMP ID | TGGTCCTGACTCCGTCTT | | | 5328 | 5345 | SEQ ID | AAGACGGAGTCAGGACCA | 1.57 |
| 1344 | 1344 | | | | | | 2972 | | |
| SEQ ID | COMP ID | AATGGTCCTGACTCCGTC | | | 5330 | 5347 | SEQ ID | GACGGAGTCAGGACCATT | 2.04 |
| 1345 | 1345 | | | | | | 2973 | | |
| SEQ ID | COMP ID | AAAATGGTCCTGACTCCG | | | 5332 | 5349 | SEQ ID | CGGAGTCAGGACCATTTT | 2.27 |
| 1346 | 1346 | | | | | | 2974 | | |
| SEQ ID | COMP ID | AAAAAATGGTCCTGACTC | | | 5334 | 5351 | SEQ ID | GAGTCAGGACCATTTTTT | 1.83 |
| 1347 | 1347 | | | | | | 2975 | | |
| SEQ ID | COMP ID | AGAAAAAATGGTCCTGAC | | | 5336 | 5353 | SEQ ID | GTCAGGACCATTTTTTCT | 1.71 |
| 1348 | 1348 | | | | | | 2976 | | |
| SEQ ID | COMP ID | TGAGAAAAAATGGTCCTG | | | 5338 | 5355 | SEQ ID | CAGGACCATTTTTTCTCA | 2.21 |
| 1349 | 1349 | | | | | | 2977 | | |
| SEQ ID | COMP ID | GTCTTCACAGCAGGAAGC | 719 | 736 | 5357 | 5374 | SEQ ID | GCTTCCTGCTGTGAAGAC | 1.33 |
| 1350 | 1350 | | | | | | 2978 | | |
| SEQ ID | COMP ID | CTGTCTTCACAGCAGGAA | 721 | 738 | 5359 | 5376 | SEQ ID | TTCCTGCTGTGAAGACAG | 1.49 |
| 1351 | 1351 | | | | | | 2979 | | |
| SEQ ID | COMP ID | CCCTGTCTTCACAGCAGG | 723 | 740 | 5361 | 5378 | SEQ ID | CCTGCTGTGAAGACAGGG | 1.76 |
| 1352 | 1352 | | | | | | 2980 | | |
| SEQ ID | COMP ID | CACCCTGTCTTCACAGCA | 725 | 742 | 5363 | 5380 | SEQ ID | TGCTGTGAAGACAGGGTG | 1.15 |
| 1353 | 1353 | | | | | | 2981 | | |
| SEQ ID | COMP ID | TGCACCCTGTCTTCACAG | 727 | 744 | 5365 | 5382 | SEQ ID | CTGTGAAGACAGGGTGCA | 1.34 |
| 1354 | 1354 | | | | | | 2982 | | |
| SEQ ID | COMP ID | AGTGCACCCTGTCTTCAC | 729 | 746 | 5367 | 5384 | SEQ ID | GTGAAGACAGGGTGCACT | 2.19 |
| 1355 | 1355 | | | | | | 2983 | | |
| SEQ ID | COMP ID | GCAGTGCACCCTGTCTTC | 731 | 748 | 5369 | 5386 | SEQ ID | GAAGACAGGGTGCACTGC | 1.27 |
| 1356 | 1356 | | | | | | 2984 | | |
| SEQ ID | COMP ID | CAGCAGTGCACCCTGTCT | 733 | 750 | 5371 | 5388 | SEQ ID | AGACAGGGTGCACTGCTG | 1.66 |
| 1357 | 1357 | | | | | | 2985 | | |
| SEQ ID | COMP ID | GACAGCAGTGCACCCTGT | 735 | 752 | 5373 | 5390 | SEQ ID | ACAGGGTGCACTGCTGTC | no data |
| 1358 | 1358 | | | | | | 2986 | | |
| SEQ ID | COMP ID | CGGACAGCAGTGCACCCT | 737 | 754 | 5375 | 5392 | SEQ ID | AGGGTGCACTGCTGTCCG | no data |
| 1359 | 1359 | | | | | | 2987 | | |
| SEQ ID | COMP ID | TGCGGACAGCAGTGCACC | 739 | 756 | 5377 | 5394 | SEQ ID | GGTGCACTGCTGTCCGCA | no data |
| 1360 | 1360 | | | | | | 2988 | | |
| SEQ ID | COMP ID | CGTGCGGACAGCAGTGCA | 741 | 758 | 5379 | 5396 | SEQ ID | TGCACTGCTGTCCGCACG | no data |
| 1361 | 1361 | | | | | | 2989 | | |
| SEQ ID | COMP ID | ACCGTGCGGACAGCAGTG | 743 | 760 | 5381 | 5398 | SEQ ID | CACTGCTGTCCGCACGGT | no data |
| 1362 | 1362 | | | | | | 2990 | | |
| SEQ ID | COMP ID | GCACCGTGCGGACAGCAG | 745 | 762 | 5383 | 5400 | SEQ ID | CTGCTGTCCGCACGGTGC | no data |
| 1363 | 1363 | | | | | | 2991 | | |
| SEQ ID | COMP ID | AGGCACCGTGCGGACAGC | 747 | 764 | 5385 | 5402 | SEQ ID | GCTGTCCGCACGGTGCCT | no data |
| 1364 | 1364 | | | | | | 2992 | | |
| SEQ ID | COMP ID | GAAGGCACCGTGCGGACA | 749 | 766 | 5387 | 5404 | SEQ ID | TGTCCGCACGGTGCCTTC | no data |
| 1365 | 1365 | | | | | | 2993 | | |
| SEQ ID | COMP ID | CAGAAGGCACCGTGCGGA | 751 | 768 | 5389 | 5406 | SEQ ID | TCCGCACGGTGCCTTCTG | no data |
| 1366 | 1366 | | | | | | 2994 | | |
| SEQ ID | COMP ID | CGCAGAAGGCACCGTGCG | 753 | 770 | 5391 | 5408 | SEQ ID | CGCACGGTGCCTTCTGCG | no data |
| 1367 | 1367 | | | | | | 2995 | | |
| SEQ ID | COMP ID | GTCGCAGAAGGCACCGTG | 755 | 772 | 5393 | 5410 | SEQ ID | CACGGTGCCTTCTGCGAC | no data |
| 1368 | 1368 | | | | | | 2996 | | |
| SEQ ID | COMP ID | AGGTCGCAGAAGGCACCG | 757 | 774 | 5395 | 5412 | SEQ ID | CGGTGCCTTCTGCGACCT | no data |
| 1369 | 1369 | | | | | | 2997 | | |
| SEQ ID | COMP ID | CCAGGTCGCAGAAGGCAC | 759 | 776 | 5397 | 5414 | SEQ ID | GTGCCTTCTGCGACCTGG | no data |
| 1370 | 1370 | | | | | | 2998 | | |
| SEQ ID | COMP ID | AACCAGGTCGCAGAAGGC | 761 | 778 | 5399 | 5416 | SEQ ID | GCCTTCTGCGACCTGGTT | no data |
| 1371 | 1371 | | | | | | 2999 | | |
| SEQ ID | COMP ID | TGAACCAGGTCGCAGAAG | 763 | 780 | 5401 | 5418 | SEQ ID | CTTCTGCGACCTGGTTCA | no data |
| 1372 | 1372 | | | | | | 3000 | | |
| SEQ ID | COMP ID | TGTGAACCAGGTCGCAGA | 765 | 782 | 5403 | 5420 | SEQ ID | TCTGCGACCTGGTTCACA | no data |
| 1373 | 1373 | | | | | | 3001 | | |
| SEQ ID | COMP ID | GGTGTGAACCAGGTCGCA | 767 | 784 | 5405 | 5422 | SEQ ID | TGCGACCTGGTTCACACC | no data |
| 1374 | 1374 | | | | | | 3002 | | |
| SEQ ID | COMP ID | CGGGTGTGAACCAGGTCG | 769 | 786 | 5407 | 5424 | SEQ ID | CGACCTGGTTCACACCCG | no data |
| 1375 | 1375 | | | | | | 3003 | | |
| SEQ ID | COMP ID | AGCGGGTGTGAACCAGGT | 771 | 788 | 5409 | 5426 | SEQ ID | ACCTGGTTCACACCCGCT | no data |
| 1376 | 1376 | | | | | | 3004 | | |
| SEQ ID | COMP ID | GCAGCGGGTGTGAACCAG | 773 | 790 | 5411 | 5428 | SEQ ID | CTGGTTCACACCCGCTGC | no data |
| 1377 | 1377 | | | | | | 3005 | | |
| SEQ ID | COMP ID | ATGCAGCGGGTGTGAACC | 775 | 792 | 5413 | 5430 | SEQ ID | GGTTCACACCCGCTGCAT | no data |
| 1378 | 1378 | | | | | | 3006 | | |
| SEQ ID | COMP ID | TGATGCAGCGGGTGTGAA | 777 | 794 | 5415 | 5432 | SEQ ID | TTCACACCCGCTGCATCA | no data |
| 1379 | 1379 | | | | | | 3007 | | |
| SEQ ID | COMP ID | TGTGATGCAGCGGGTGTG | 779 | 796 | 5417 | 5434 | SEQ ID | CACACCCGCTGCATCACA | no data |
| 1380 | 1380 | | | | | | 3008 | | |
| SEQ ID | COMP ID | GGTGTGATGCAGCGGGTG | 781 | 798 | 5419 | 5436 | SEQ ID | CACCCGCTGCATCACACC | no data |
| 1381 | 1381 | | | | | | 3009 | | |
| SEQ ID | COMP ID | TGGGTGTGATGCAGCGGG | 783 | 800 | 5421 | 5438 | SEQ ID | CCCGCTGCATCACACCCA | no data |
| 1382 | 1382 | | | | | | 3010 | | |
| SEQ ID | COMP ID | CGTGGGTGTGATGCAGCG | 785 | 802 | 5423 | 5440 | SEQ ID | CGCTGCATCACACCCACG | no data |
| 1383 | 1383 | | | | | | 3011 | | |
| SEQ ID | COMP ID | CCCGTGGGTGTGATGCAG | 787 | 804 | 5425 | 5442 | SEQ ID | CTGCATCACACCCACGGG | no data |
| 1384 | 1384 | | | | | | 3012 | | |
| SEQ ID | COMP ID | TGCCCGTGGGTGTGATGC | 789 | 806 | 5427 | 5444 | SEQ ID | GCATCACACCCACGGGCA | no data |
| 1385 | 1385 | | | | | | 3013 | | |
| SEQ ID | COMP ID | GGTGCCCGTGGGTGTGAT | 791 | 808 | 5429 | 5446 | SEQ ID | ATCACACCCACGGGCACC | no data |
| 1386 | 1386 | | | | | | 3014 | | |
| SEQ ID | COMP ID | TGGGTGCCCGTGGGTGTG | 793 | 810 | 5431 | 5448 | SEQ ID | CACACCCACGGGCACCCA | no data |
| 1387 | 1387 | | | | | | 3015 | | |
| SEQ ID | COMP ID | GGTGGGTGCCCGTGGGTG | 795 | 812 | 5433 | 5450 | SEQ ID | CACCCACGGGCACCCACC | no data |
| 1388 | 1388 | | | | | | 3016 | | |
| SEQ ID | COMP ID | GGGGTGGGTGCCCGTGGG | 797 | 814 | 5435 | 5452 | SEQ ID | CCCACGGGCACCCACCCC | no data |
| 1389 | 1389 | | | | | | 3017 | | |
| SEQ ID | COMP ID | AGGGGGTGGGTGCCCGTG | 799 | 816 | 5437 | 5454 | SEQ ID | CACGGGCACCCACCCCCT | no data |
| 1390 | 1390 | | | | | | 3018 | | |
| SEQ ID | COMP ID | CCAGGGGGTGGGTGCCCG | 801 | 818 | 5439 | 5456 | SEQ ID | CGGGCACCCACCCCCTGG | no data |
| 1391 | 1391 | | | | | | 3019 | | |
| SEQ ID | COMP ID | TGCCAGGGGGTGGGTGCC | 803 | 820 | 5441 | 5458 | SEQ ID | GGCACCCACCCCCTGGCA | no data |
| 1392 | 1392 | | | | | | 3020 | | |
| SEQ ID | COMP ID | TTTGCCAGGGGGTGGGTG | 805 | 822 | 5443 | 5460 | SEQ ID | CACCCACCCCCTGGCAAA | no data |
| 1393 | 1393 | | | | | | 3021 | | |
| SEQ ID | COMP ID | TCTTTGCCAGGGGGTGGG | 807 | 824 | 5445 | 5462 | SEQ ID | CCCACCCCCTGGCAAAGA | no data |
| 1394 | 1394 | | | | | | 3022 | | |
| SEQ ID | COMP ID | CTTCTTTGCCAGGGGGTG | 809 | 826 | 5447 | 5464 | SEQ ID | CACCCCCTGGCAAAGAAG | no data |
| 1395 | 1395 | | | | | | 3023 | | |
| SEQ ID | COMP ID | AGCTTCTTTGCCAGGGGG | 811 | 828 | 5449 | 5466 | SEQ ID | CCCCCTGGCAAAGAAGCT | no data |
| 1396 | 1396 | | | | | | 3024 | | |
| SEQ ID | COMP ID | GGAGCTTCTTTGCCAGGG | 813 | 830 | 5451 | 5468 | SEQ ID | CCCTGGCAAAGAAGCTCC | no data |
| 1397 | 1397 | | | | | | 3025 | | |
| SEQ ID | COMP ID | AGGGAGCTTCTTTGCCAG | 815 | 832 | 5453 | 5470 | SEQ ID | CTGGCAAAGAAGCTCCCT | no data |
| 1398 | 1398 | | | | | | 3026 | | |
| SEQ ID | COMP ID | GCAGGGAGCTTCTTTGCC | 817 | 834 | 5455 | 5472 | SEQ ID | GGCAAAGAAGCTCCCTGC | no data |
| 1399 | 1399 | | | | | | 3027 | | |
| SEQ ID | COMP ID | GGGCAGGGAGCTTCTTTG | 819 | 836 | 5457 | 5474 | SEQ ID | CAAAGAAGCTCCCTGCCC | no data |
| 1400 | 1400 | | | | | | 3028 | | |
| SEQ ID | COMP ID | CTGGGCAGGGAGCTTCTT | 821 | 838 | 5459 | 5476 | SEQ ID | AAGAAGCTCCCTGCCCAG | no data |
| 1401 | 1401 | | | | | | 3029 | | |
| SEQ ID | COMP ID | CTCTGGGCAGGGAGCTTC | 823 | 840 | 5461 | 5478 | SEQ ID | GAAGCTCCCTGCCCAGAG | no data |
| 1402 | 1402 | | | | | | 3030 | | |
| SEQ ID | COMP ID | TCCTCTGGGCAGGGAGCT | 825 | 842 | 5463 | 5480 | SEQ ID | AGCTCCCTGCCCAGAGGA | no data |
| 1403 | 1403 | | | | | | 3031 | | |
| SEQ ID | COMP ID | AGTCCTCTGGGCAGGGAG | 827 | 844 | 5465 | 5482 | SEQ ID | CTCCCTGCCCAGAGGACT | no data |
| 1404 | 1404 | | | | | | 3032 | | |
| SEQ ID | COMP ID | TTAGTCCTCTGGGCAGGG | 829 | 846 | 5467 | 5484 | SEQ ID | CCCTGCCCAGAGGACTAA | no data |
| 1405 | 1405 | | | | | | 3033 | | |
| SEQ ID | COMP ID | TGTTAGTCCTCTGGGCAG | 831 | 848 | 5469 | 5486 | SEQ ID | CTGCCCAGAGGACTAACA | no data |
| 1406 | 1406 | | | | | | 3034 | | |
| SEQ ID | COMP ID | CCTGTTAGTCCTCTGGGC | 833 | 850 | 5471 | 5488 | SEQ ID | GCCCAGAGGACTAACAGG | no data |
| 1407 | 1407 | | | | | | 3035 | | |
| SEQ ID | COMP ID | GCCCTGTTAGTCCTCTGG | 835 | 852 | 5473 | 5490 | SEQ ID | CCAGAGGACTAACAGGGC | no data |
| 1408 | 1408 | | | | | | 3036 | | |
| SEQ ID | COMP ID | CTGCCCTGTTAGTCCTCT | 837 | 854 | 5475 | 5492 | SEQ ID | AGAGGACTAACAGGGCAG | no data |
| 1409 | 1409 | | | | | | 3037 | | |
| SEQ ID | COMP ID | ACCTGCCCTGTTAGTCCT | | | 5477 | 5494 | SEQ ID | AGGACTAACAGGGCAGGT | no data |
| 1410 | 1410 | | | | | | 3038 | | |
| SEQ ID | COMP ID | TCACCTGCCCTGTTAGTC | | | 5479 | 5496 | SEQ ID | GACTAACAGGGCAGGTGA | no data |
| 1411 | 1411 | | | | | | 3039 | | |
| SEQ ID | COMP ID | CCTCACCTGCCCTGTTAG | | | 5481 | 5498 | SEQ ID | CTAACAGGGCAGGTGAGG | no data |
| 1412 | 1412 | | | | | | 3040 | | |
| SEQ ID | COMP ID | CTCCTCACCTGCCCTGTT | | | 5483 | 5500 | SEQ ID | AACAGGGCAGGTGAGGAG | no data |
| 1413 | 1413 | | | | | | 3041 | | |
| SEQ ID | COMP ID | ACCTCCTCACCTGCCCTG | | | 5485 | 5502 | SEQ ID | CAGGGCAGGTGAGGAGGT | no data |
| 1414 | 1414 | | | | | | 3042 | | |
| SEQ ID | COMP ID | CCACCTCCTCACCTGCCC | | | 5487 | 5504 | SEQ ID | GGGCAGGTGAGGAGGTGG | no data |
| 1415 | 1415 | | | | | | 3043 | | |
| SEQ ID | COMP ID | TCCCACCTCCTCACCTGC | | | 5489 | 5506 | SEQ ID | GCAGGTGAGGAGGTGGGA | no data |
| 1416 | 1416 | | | | | | 3044 | | |
| SEQ ID | COMP ID | TCTCCCACCTCCTCACCT | | | 5491 | 5508 | SEQ ID | AGGTGAGGAGGTGGGAGA | no data |
| 1417 | 1417 | | | | | | 3045 | | |
| SEQ ID | COMP ID | GCTCTCCCACCTCCTCAC | | | 5493 | 5510 | SEQ ID | GTGAGGAGGTGGGAGAGC | no data |
| 1418 | 1418 | | | | | | 3046 | | |
| SEQ ID | COMP ID | ATGCTCTCCCACCTCCTC | | | 5495 | 5512 | SEQ ID | GAGGAGGTGGGAGAGCAT | no data |
| 1419 | 1419 | | | | | | 3047 | | |
| SEQ ID | COMP ID | TGATGCTCTCCCACCTCC | | | 5497 | 5514 | SEQ ID | GGAGGTGGGAGAGCATCA | no data |
| 1420 | 1420 | | | | | | 3048 | | |
| SEQ ID | COMP ID | CCTGATGCTCTCCCACCT | | | 5499 | 5516 | SEQ ID | AGGTGGGAGAGCATCAGG | no data |
| 1421 | 1421 | | | | | | 3049 | | |
| SEQ ID | COMP ID | GGCCTGATGCTCTCCCAC | | | 5501 | 5518 | SEQ ID | GTGGGAGAGCATCAGGCC | no data |
| 1422 | 1422 | | | | | | 3050 | | |
| SEQ ID | COMP ID | CTGGCCTGATGCTCTCCC | | | 5503 | 5520 | SEQ ID | GGGAGAGCATCAGGCCAG | no data |
| 1423 | 1423 | | | | | | 3051 | | |
| SEQ ID | COMP ID | CCCTGGCCTGATGCTCTC | | | 5505 | 5522 | SEQ ID | GAGAGCATCAGGCCAGGG | no data |
| 1424 | 1424 | | | | | | 3052 | | |
| SEQ ID | COMP ID | GCCCCTGGCCTGATGCTC | | | 5507 | 5524 | SEQ ID | GAGCATCAGGCCAGGGGC | 1.58 |
| 1425 | 1425 | | | | | | 3053 | | |
| SEQ ID | COMP ID | CAGCCCCTGGCCTGATGC | | | 5509 | 5526 | SEQ ID | GCATCAGGCCAGGGGCTG | 1.73 |
| 1426 | 1426 | | | | | | 3054 | | |
| SEQ ID | COMP ID | CCCAGCCCCTGGCCTGAT | | | 5511 | 5528 | SEQ ID | ATCAGGCCAGGGGCTGGG | 1.59 |
| 1427 | 1427 | | | | | | 3055 | | |
| SEQ ID | COMP ID | GCCCCAGCCCCTGGCCTG | | | 5513 | 5530 | SEQ ID | CAGGCCAGGGGCTGGGGC | 1.52 |
| 1428 | 1428 | | | | | | 3056 | | |
| SEQ ID | COMP ID | CCGCCCCAGCCCCTGGCC | | | 5515 | 5532 | SEQ ID | GGCCAGGGGCTGGGGCGG | 1.14 |
| 1429 | 1429 | | | | | | 3057 | | |
| SEQ ID | COMP ID | CCCCGCCCCAGCCCCTGG | | | 5517 | 5534 | SEQ ID | CCAGGGGCTGGGGGGGG | 1.58 |
| 1430 | 1430 | | | | | | 3058 | | |
| SEQ ID | COMP ID | GGCCCCGCCCCAGCCCCT | | | 5519 | 5536 | SEQ ID | AGGGGCTGGGGGGGGGCC | 1.56 |
| 1431 | 1431 | | | | | | 3059 | | |
| SEQ ID | COMP ID | GAGGCCCCGCCCCAGCCC | | | 5521 | 5538 | SEQ ID | GGGCTGGGGGGGGGCCTC | 1.7 |
| 1432 | 1432 | | | | | | 3060 | | |
| SEQ ID | COMP ID | ATGAGGCCCCGCCCCAGC | | | 5523 | 5540 | SEQ ID | GCTGGGGGGGGGCCTCAT | 1.52 |
| 1433 | 1433 | | | | | | 3061 | | |
| SEQ ID | COMP ID | CAATGAGGCCCCGCCCCA | | | 5525 | 5542 | SEQ ID | TGGGGGGGGGCCTCATTG | 1.74 |
| 1434 | 1434 | | | | | | 3062 | | |
| SEQ ID | COMP ID | ATGGAGGAAACTTTTTCC | | | 5555 | 5572 | SEQ ID | GGAAAAAGTTTCCTCCAT | 1.77 |
| 1435 | 1435 | | | | | | 3063 | | |
| SEQ ID | COMP ID | GGATGGAGGAAACTTTTT | | | 5557 | 5574 | SEQ ID | AAAAAGTTTCCTCCATCC | 2.6 |
| 1436 | 1436 | | | | | | 3064 | | |
| SEQ ID | COMP ID | CAGGATGGAGGAAACTTT | | | 5559 | 5576 | SEQ ID | AAAGTTTCCTCCATCCTG | 1.94 |
| 1437 | 1437 | | | | | | 3065 | | |
| SEQ ID | COMP ID | GCCAGGATGGAGGAAACT | | | 5561 | 5578 | SEQ ID | AGTTTCCTCCATCCTGGC | 1.72 |
| 1438 | 1438 | | | | | | 3066 | | |
| SEQ ID | COMP ID | CAGCCAGGATGGAGGAAA | | | 5563 | 5580 | SEQ ID | TTTCCTCCATCCTGGCTG | no data |
| 1439 | 1439 | | | | | | 3067 | | |
| SEQ ID | COMP ID | GGCAGCCAGGATGGAGGA | | | 5565 | 5582 | SEQ ID | TCCTCCATCCTGGCTGCC | 3.11 |
| 1440 | 1440 | | | | | | 3068 | | |
| SEQ ID | COMP ID | GGGGCAGCCAGGATGGAG | | | 5567 | 5584 | SEQ ID | CTCCATCCTGGCTGCCCC | 2.65 |
| 1441 | 1441 | | | | | | 3069 | | |
| SEQ ID | COMP ID | GAGGGGCAGCCAGGATGG | | | 5569 | 5586 | SEQ ID | CCATCCTGGCTGCCCCTC | 2.63 |
| 1442 | 1442 | | | | | | 3070 | | |
| SEQ ID | COMP ID | GTGAGGGGCAGCCAGGAT | | | 5571 | 5588 | SEQ ID | ATCCTGGCTGCCCCTCAC | 2.15 |
| 1443 | 1443 | | | | | | 3071 | | |
| SEQ ID | COMP ID | ACGTGAGGGGCAGCCAGG | | | 5573 | 5590 | SEQ ID | CCTGGCTGCCCCTCACGT | 2.66 |
| 1444 | 1444 | | | | | | 3072 | | |
| SEQ ID | COMP ID | AAACGTGAGGGGCAGCCA | | | 5575 | 5592 | SEQ ID | TGGCTGCCCCTCACGTTT | 2.59 |
| 1445 | 1445 | | | | | | 3073 | | |
| SEQ ID | COMP ID | GCAAACGTGAGGGGCAGC | | | 5577 | 5594 | SEQ ID | GCTGCCCCTCACGTTTGC | 3.29 |
| 1446 | 1446 | | | | | | 3074 | | |
| SEQ ID | COMP ID | GAGCAAACGTGAGGGGCA | | | 5579 | 5596 | SEQ ID | TGCCCCTCACGTTTGCTC | 2.45 |
| 1447 | 1447 | | | | | | 3075 | | |
| SEQ ID | COMP ID | AGGAGCAAACGTGAGGGG | | | 5581 | 5598 | SEQ ID | CCCCTCACGTTTGCTCCT | 2.77 |
| 1448 | 1448 | | | | | | 3076 | | |
| SEQ ID | COMP ID | AGAGGAGCAAACGTGAGG | | | 5583 | 5600 | SEQ ID | CCTCACGTTTGCTCCTCT | 1.89 |
| 1449 | 1449 | | | | | | 3077 | | |
| SEQ ID | COMP ID | GAAGAGGAGCAAACGTGA | | | 5585 | 5602 | SEQ ID | TCACGTTTGCTCCTCTTC | 1.62 |
| 1450 | 1450 | | | | | | 3078 | | |
| SEQ ID | COMP ID | TGGAAGAGGAGCAAACGT | | | 5587 | 5604 | SEQ ID | ACGTTTGCTCCTCTTCCA | 2.33 |
| 1451 | 1451 | | | | | | 3079 | | |
| SEQ ID | COMP ID | CCGAGCTGGACAAGGCCA | 855 | 872 | 5606 | 5623 | SEQ ID | TGGCCTTGTCCAGCTCGG | 1.44 |
| 1452 | 1452 | | | | | | 3080 | | |
| SEQ ID | COMP ID | GACCGAGCTGGACAAGGC | 857 | 874 | 5608 | 5625 | SEQ ID | GCCTTGTCCAGCTCGGTC | 1.24 |
| 1453 | 1453 | | | | | | 3081 | | |
| SEQ ID | COMP ID | ATGACCGAGCTGGACAAG | 859 | 876 | 5610 | 5627 | SEQ ID | CTTGTCCAGCTCGGTCAT | 1.75 |
| 1454 | 1454 | | | | | | 3082 | | |
| SEQ ID | COMP ID | ACATGACCGAGCTGGACA | 861 | 878 | 5612 | 5629 | SEQ ID | TGTCCAGCTCGGTCATGT | 1.79 |
| 1455 | 1455 | | | | | | 3083 | | |
| SEQ ID | COMP ID | ACACATGACCGAGCTGGA | 863 | 880 | 5614 | 5631 | SEQ ID | TCCAGCTCGGTCATGTGT | 2.12 |
| 1456 | 1456 | | | | | | 3084 | | |
| SEQ ID | COMP ID | GGACACATGACCGAGCTG | 865 | 882 | 5616 | 5633 | SEQ ID | CAGCTCGGTCATGTGTCC | 1.52 |
| 1457 | 1457 | | | | | | 3085 | | |
| SEQ ID | COMP ID | CCGGACACATGACCGAGC | 867 | 884 | 5618 | 5635 | SEQ ID | GCTCGGTCATGTGTCCGG | 1.4 |
| 1458 | 1458 | | | | | | 3086 | | |
| SEQ ID | COMP ID | GTCCGGACACATGACCGA | 869 | 886 | 5620 | 5637 | SEQ ID | TCGGTCATGTGTCCGGAC | 1.42 |
| 1459 | 1459 | | | | | | 3087 | | |
| SEQ ID | COMP ID | GCGTCCGGACACATGACC | 871 | 888 | 5622 | 5639 | SEQ ID | GGTCATGTGTCCGGACGC | 1.94 |
| 1460 | 1460 | | | | | | 3088 | | |
| SEQ ID | COMP ID | GTGCGTCCGGACACATGA | 873 | 890 | 5624 | 5641 | SEQ ID | TCATGTGTCCGGACGCAC | 2.11 |
| 1461 | 1461 | | | | | | 3089 | | |
| SEQ ID | COMP ID | CCGTGCGTCCGGACACAT | 875 | 892 | 5626 | 5643 | SEQ ID | ATGTGTCCGGACGCACGG | 1.71 |
| 1462 | 1462 | | | | | | 3090 | | |
| SEQ ID | COMP ID | GACCGTGCGTCCGGACAC | 877 | 894 | 5628 | 5645 | SEQ ID | GTGTCCGGACGCACGGTC | 1.75 |
| 1463 | 1463 | | | | | | 3091 | | |
| SEQ ID | COMP ID | GGGACCGTGCGTCCGGAC | 879 | 896 | 5630 | 5647 | SEQ ID | GTCCGGACGCACGGTCCC | 2.52 |
| 1464 | 1464 | | | | | | 3092 | | |
| SEQ ID | COMP ID | CCGGGACCGTGCGTCCGG | 881 | 898 | 5632 | 5649 | SEQ ID | CCGGACGCACGGTCCCGG | 1.4 |
| 1465 | 1465 | | | | | | 3093 | | |
| SEQ ID | COMP ID | CACCGGGACCGTGCGTCC | 883 | 900 | 5634 | 5651 | SEQ ID | GGACGCACGGTCCCGGTG | 1.09 |
| 1466 | 1466 | | | | | | 3094 | | |
| SEQ ID | COMP ID | GGCACCGGGACCGTGCGT | 885 | 902 | 5636 | 5653 | SEQ ID | ACGCACGGTCCCGGTGCC | 2.16 |
| 1467 | 1467 | | | | | | 3095 | | |
| SEQ ID | COMP ID | AGGGCACCGGGACCGTGC | 887 | 904 | 5638 | 5655 | SEQ ID | GCACGGTCCCGGTGCCCT | no data |
| 1468 | 1468 | | | | | | 3096 | | |
| SEQ ID | COMP ID | TCAGGGCACCGGGACCGT | 889 | 906 | 5640 | 5657 | SEQ ID | ACGGTCCCGGTGCCCTGA | 1.69 |
| 1469 | 1469 | | | | | | 3097 | | |
| SEQ ID | COMP ID | CATCAGGGCACCGGGACC | 891 | 908 | 5642 | 5659 | SEQ ID | GGTCCCGGTGCCCTGATG | 1.31 |
| 1470 | 1470 | | | | | | 3098 | | |
| SEQ ID | COMP ID | ACCATCAGGGCACCGGGA | 893 | 910 | 5644 | 5661 | SEQ ID | TCCCGGTGCCCTGATGGT | 1.44 |
| 1471 | 1471 | | | | | | 3099 | | |
| SEQ ID | COMP ID | GAACCATCAGGGCACCGG | 895 | 912 | 5646 | 5663 | SEQ ID | CCGGTGCCCTGATGGTTC | 1.41 |
| 1472 | 1472 | | | | | | 3100 | | |
| SEQ ID | COMP ID | TAGAACCATCAGGGCACC | 897 | 914 | 5648 | 5665 | SEQ ID | GGTGCCCTGATGGTTCTA | no data |
| 1473 | 1473 | | | | | | 3101 | | |
| SEQ ID | COMP ID | GGTAGAACCATCAGGGCA | 899 | 916 | 5650 | 5667 | SEQ ID | TGCCCTGATGGTTCTACC | 1.57 |
| 1474 | 1474 | | | | | | 3102 | | |
| SEQ ID | COMP ID | CAGGTAGAACCATCAGGG | 901 | 918 | 5652 | 5669 | SEQ ID | CCCTGATGGTTCTACCTG | 1.18 |
| 1475 | 1475 | | | | | | 3103 | | |
| SEQ ID | COMP ID | AGCAGGTAGAACCATCAG | 903 | 920 | 5654 | 5671 | SEQ ID | CTGATGGTTCTACCTGCT | 1.21 |
| 1476 | 1476 | | | | | | 3104 | | |
| SEQ ID | COMP ID | ACAGCAGGTAGAACCATC | 905 | 922 | 5656 | 5673 | SEQ ID | GATGGTTCTACCTGCTGT | 1.05 |
| 1477 | 1477 | | | | | | 3105 | | |
| SEQ ID | COMP ID | TCACAGCAGGTAGAACCA | 907 | 924 | 5658 | 5675 | SEQ ID | TGGTTCTACCTGCTGTGA | 1.79 |
| 1478 | 1478 | | | | | | 3106 | | |
| SEQ ID | COMP ID | GCTCACAGCAGGTAGAAC | 909 | 926 | 5660 | 5677 | SEQ ID | GTTCTACCTGCTGTGAGC | 1.24 |
| 1479 | 1479 | | | | | | 3107 | | |
| SEQ ID | COMP ID | CAGCTCACAGCAGGTAGA | 911 | 928 | 5662 | 5679 | SEQ ID | TCTACCTGCTGTGAGCTG | 1.69 |
| 1480 | 1480 | | | | | | 3108 | | |
| SEQ ID | COMP ID | GGCAGCTCACAGCAGGTA | 913 | 930 | 5664 | 5681 | SEQ ID | TACCTGCTGTGAGCTGCC | 1.29 |
| 1481 | 1481 | | | | | | 3109 | | |
| SEQ ID | COMP ID | TGGGCAGCTCACAGCAGG | 915 | 932 | 5666 | 5683 | SEQ ID | CCTGCTGTGAGCTGCCCA | 1.65 |
| 1482 | 1482 | | | | | | 3110 | | |
| SEQ ID | COMP ID | ACTGGGCAGCTCACAGCA | 917 | 934 | 5668 | 5685 | SEQ ID | TGCTGTGAGCTGCCCAGT | 0.89 |
| 1483 | 1483 | | | | | | 3111 | | |
| SEQ ID | COMP ID | CCACTGGGCAGCTCACAG | 919 | 936 | 5670 | 5687 | SEQ ID | CTGTGAGCTGCCCAGTGG | 1.26 |
| 1484 | 1484 | | | | | | 3112 | | |
| SEQ ID | COMP ID | TCCCACTGGGCAGCTCAC | 921 | 938 | 5672 | 5689 | SEQ ID | GTGAGCTGCCCAGTGGGA | 1.4 |
| 1485 | 1485 | | | | | | 3113 | | |
| SEQ ID | COMP ID | CTTCCCACTGGGCAGCTC | 923 | 940 | 5674 | 5691 | SEQ ID | GAGCTGCCCAGTGGGAAG | no data |
| 1486 | 1486 | | | | | | 3114 | | |
| SEQ ID | COMP ID | TACTTCCCACTGGGCAGC | 925 | 942 | 5676 | 5693 | SEQ ID | GCTGCCCAGTGGGAAGTA | 1.37 |
| 1487 | 1487 | | | | | | 3115 | | |
| SEQ ID | COMP ID | CATACTTCCCACTGGGCA | 927 | 944 | 5678 | 5695 | SEQ ID | TGCCCAGTGGGAAGTATG | 1.5 |
| 1488 | 1488 | | | | | | 3116 | | |
| SEQ ID | COMP ID | GCCATACTTCCCACTGGG | 929 | 946 | 5680 | 5697 | SEQ ID | CCCAGTGGGAAGTATGGC | 1.08 |
| 1489 | 1489 | | | | | | 3117 | | |
| SEQ ID | COMP ID | CAGCCATACTTCCCACTG | 931 | 948 | 5682 | 5699 | SEQ ID | CAGTGGGAAGTATGGCTG | 0.8 |
| 1490 | 1490 | | | | | | 3118 | | |
| SEQ ID | COMP ID | AGCAGCCATACTTCCCAC | 933 | 950 | 5684 | 5701 | SEQ ID | GTGGGAAGTATGGCTGCT | 1.06 |
| 1491 | 1491 | | | | | | 3119 | | |
| SEQ ID | COMP ID | GCAGCAGCCATACTTCCC | 935 | 952 | 5686 | 5703 | SEQ ID | GGGAAGTATGGCTGCTGC | 1.59 |
| 1492 | 1492 | | | | | | 3120 | | |
| SEQ ID | COMP ID | GGGCAGCAGCCATACTTC | 937 | 954 | 5688 | 5705 | SEQ ID | GAAGTATGGCTGCTGCCC | 1.95 |
| 1493 | 1493 | | | | | | 3121 | | |
| SEQ ID | COMP ID | TTGGGCAGCAGCCATACT | 939 | 956 | 5690 | 5707 | SEQ ID | AGTATGGCTGCTGCCCAA | 1.36 |
| 1494 | 1494 | | | | | | 3122 | | |
| SEQ ID | COMP ID | CATTGGGCAGCAGCCATA | 941 | 958 | 5692 | 5709 | SEQ ID | TATGGCTGCTGCCCAATG | 1.36 |
| 1495 | 1495 | | | | | | 3123 | | |
| SEQ ID | COMP ID | GGCATTGGGCAGCAGCCA | 943 | 960 | 5694 | 5711 | SEQ ID | TGGCTGCTGCCCAATGCC | 1.49 |
| 1496 | 1496 | | | | | | 3124 | | |
| SEQ ID | COMP ID | TGGGCATTGGGCAGCAGC | 945 | 962 | 5696 | 5713 | SEQ ID | GCTGCTGCCCAATGCCCA | 1.56 |
| 1497 | 1497 | | | | | | 3125 | | |
| SEQ ID | COMP ID | GTTGGGCATTGGGCAGCA | 947 | 964 | 5698 | 5715 | SEQ ID | TGCTGCCCAATGCCCAAC | 1.56 |
| 1498 | 1498 | | | | | | 3126 | | |
| SEQ ID | COMP ID | GCTCCAGCCCCTCACTCA | | | 5717 | 5734 | SEQ ID | TGAGTGAGGGGCTGGAGC | 1.37 |
| 1499 | 1499 | | | | | | 3127 | | |
| SEQ ID | COMP ID | TGGCTCCAGCCCCTCACT | | | 5719 | 5736 | SEQ ID | AGTGAGGGGCTGGAGCCA | 1.21 |
| 1500 | 1500 | | | | | | 3128 | | |
| SEQ ID | COMP ID | GCTGGCTCCAGCCCCTCA | | | 5721 | 5738 | SEQ ID | TGAGGGGCTGGAGCCAGC | 1.23 |
| 1501 | 1501 | | | | | | 3129 | | |
| SEQ ID | COMP ID | AAGCTGGCTCCAGCCCCT | | | 5723 | 5740 | SEQ ID | AGGGGCTGGAGCCAGCTT | 1.16 |
| 1502 | 1502 | | | | | | 3130 | | |
| SEQ ID | COMP ID | CCAAGCTGGCTCCAGCCC | | | 5725 | 5742 | SEQ ID | GGGCTGGAGCCAGCTTGG | 1.06 |
| 1503 | 1503 | | | | | | 3131 | | |
| SEQ ID | COMP ID | AGCCAAGCTGGCTCCAGC | | | 5727 | 5744 | SEQ ID | GCTGGAGCCAGCTTGGCT | 1.25 |
| 1504 | 1504 | | | | | | 3132 | | |
| SEQ ID | COMP ID | ACAGCCAAGCTGGCTCCA | | | 5729 | 5746 | SEQ ID | TGGAGCCAGCTTGGCTGT | 1.75 |
| 1505 | 1505 | | | | | | 3133 | | |
| SEQ ID | COMP ID | ACACAGCCAAGCTGGCTC | | | 5731 | 5748 | SEQ ID | GAGCCAGCTTGGCTGTGT | 1.96 |
| 1506 | 1506 | | | | | | 3134 | | |
| SEQ ID | COMP ID | GCACACAGCCAAGCTGGC | | | 5733 | 5750 | SEQ ID | GCCAGCTTGGCTGTGTGC | 1.7 |
| 1507 | 1507 | | | | | | 3135 | | |
| SEQ ID | COMP ID | GGGCACACAGCCAAGCTG | | | 5735 | 5752 | SEQ ID | CAGCTTGGCTGTGTGCCC | 1.38 |
| 1508 | 1508 | | | | | | 3136 | | |
| SEQ ID | COMP ID | GGGGGCACACAGCCAAGC | | | 5737 | 5754 | SEQ ID | GCTTGGCTGTGTGCCCCC | 2.09 |
| 1509 | 1509 | | | | | | 3137 | | |
| SEQ ID | COMP ID | CTGGGGGCACACAGCCAA | | | 5739 | 5756 | SEQ ID | TTGGCTGTGTGCCCCCAG | 2.15 |
| 1510 | 1510 | | | | | | 3138 | | |
| SEQ ID | COMP ID | GGCTGGGGGCACACAGCC | | | 5741 | 5758 | SEQ ID | GGCTGTGTGCCCCCAGCC | 1.46 |
| 1511 | 1511 | | | | | | 3139 | | |
| SEQ ID | COMP ID | GTGGCTGGGGGCACACAG | | | 5743 | 5760 | SEQ ID | CTGTGTGCCCCCAGCCAC | 1.67 |
| 1512 | 1512 | | | | | | 3140 | | |
| SEQ ID | COMP ID | AGGTGGCTGGGGGCACAC | | | 5745 | 5762 | SEQ ID | GTGTGCCCCCAGCCACCT | 2.14 |
| 1513 | 1513 | | | | | | 3141 | | |
| SEQ ID | COMP ID | CCAGGTGGCTGGGGGCAC | | | 5747 | 5764 | SEQ ID | GTGCCCCCAGCCACCTGG | 1.51 |
| 1514 | 1514 | | | | | | 3142 | | |
| SEQ ID | COMP ID | GGCCAGGTGGCTGGGGGC | | | 5749 | 5766 | SEQ ID | GCCCCCAGCCACCTGGCC | 2.43 |
| 1515 | 1515 | | | | | | 3143 | | |
| SEQ ID | COMP ID | CCAGCCCCATGCCACAGA | | | 5789 | 5806 | SEQ ID | TCTGTGGCATGGGGCTGG | 1.27 |
| 1516 | 1516 | | | | | | 3144 | | |
| SEQ ID | COMP ID | AGCCAGCCCCATGCCACA | | | 5791 | 5808 | SEQ ID | TGTGGCATGGGGCTGGCT | 1.56 |
| 1517 | 1517 | | | | | | 3145 | | |
| SEQ ID | COMP ID | CCAGCCAGCCCCATGCCA | | | 5793 | 5810 | SEQ ID | TGGCATGGGGCTGGCTGG | 1.14 |
| 1518 | 1518 | | | | | | 3146 | | |
| SEQ ID | COMP ID | CCTGCATCAGCCAGGCTC | | | 5822 | 5839 | SEQ ID | GAGCCTGGCTGATGCAGG | 1.44 |
| 1519 | 1519 | | | | | | 3147 | | |
| SEQ ID | COMP ID | ACCCTGCATCAGCCAGGC | | | 5824 | 5841 | SEQ ID | GCCTGGCTGATGCAGGGT | 1.56 |
| 1520 | 1520 | | | | | | 3148 | | |
| SEQ ID | COMP ID | GAACCCTGCATCAGCCAG | | | 5826 | 5843 | SEQ ID | CTGGCTGATGCAGGGTTC | 1.22 |
| 1521 | 1521 | | | | | | 3149 | | |
| SEQ ID | COMP ID | ATGAACCCTGCATCAGCC | | | 5828 | 5845 | SEQ ID | GGCTGATGCAGGGTTCAT | 1.37 |
| 1522 | 1522 | | | | | | 3150 | | |
| SEQ ID | COMP ID | TCCAGGCTCAGTAGCACA | | | 5902 | 5919 | SEQ ID | TGTGCTACTGAGCCTGGA | 1.43 |
| 1523 | 1523 | | | | | | 3151 | | |
| SEQ ID | COMP ID | CTTCCAGGCTCAGTAGCA | | | 5904 | 5921 | SEQ ID | TGCTACTGAGCCTGGAAG | 1.76 |
| 1524 | 1524 | | | | | | 3152 | | |
| SEQ ID | COMP ID | CACTTCCAGGCTCAGTAG | | | 5906 | 5923 | SEQ ID | CTACTGAGCCTGGAAGTG | 1.52 |
| 1525 | 1525 | | | | | | 3153 | | |
| SEQ ID | COMP ID | GTCACTTCCAGGCTCAGT | | | 5908 | 5925 | SEQ ID | ACTGAGCCTGGAAGTGAC | 1.48 |
| 1526 | 1526 | | | | | | 3154 | | |
| SEQ ID | COMP ID | TTGTCACTTCCAGGCTCA | | | 5910 | 5927 | SEQ ID | TGAGCCTGGAAGTGACAA | 1.47 |
| 1527 | 1527 | | | | | | 3155 | | |
| SEQ ID | COMP ID | CTTTGTCACTTCCAGGCT | | | 5912 | 5929 | SEQ ID | AGCCTGGAAGTGACAAAG | 1.78 |
| 1528 | 1528 | | | | | | 3156 | | |
| SEQ ID | COMP ID | GTCTTTGTCACTTCCAGG | | | 5914 | 5931 | SEQ ID | CCTGGAAGTGACAAAGAC | 1.55 |
| 1529 | 1529 | | | | | | 3157 | | |
| SEQ ID | COMP ID | GGGTCTTTGTCACTTCCA | | | 5916 | 5933 | SEQ ID | TGGAAGTGACAAAGACCC | 2.02 |
| 1530 | 1530 | | | | | | 3158 | | |
| SEQ ID | COMP ID | GTGGGTCTTTGTCACTTC | | | 5918 | 5935 | SEQ ID | GAAGTGACAAAGACCCAC | 1.94 |
| 1531 | 1531 | | | | | | 3159 | | |
| SEQ ID | COMP ID | GGGTGGGTCTTTGTCACT | | | 5920 | 5937 | SEQ ID | AGTGACAAAGACCCACCC | 1.91 |
| 1532 | 1532 | | | | | | 3160 | | |
| SEQ ID | COMP ID | AGGGGTGGGTCTTTGTCA | | | 5922 | 5939 | SEQ ID | TGACAAAGACCCACCCCT | 2.21 |
| 1533 | 1533 | | | | | | 3161 | | |
| SEQ ID | COMP ID | ACAGGGGTGGGTCTTTGT | | | 5924 | 5941 | SEQ ID | ACAAAGACCCACCCCTGT | 2.12 |
| 1534 | 1534 | | | | | | 3162 | | |
| SEQ ID | COMP ID | GGACAGGGGTGGGTCTTT | | | 5926 | 5943 | SEQ ID | AAAGACCCACCCCTGTCC | 2.22 |
| 1535 | 1535 | | | | | | 3163 | | |
| SEQ ID | COMP ID | GGGGACAGGGGTGGGTCT | | | 5928 | 5945 | SEQ ID | AGACCCACCCCTGTCCCC | 2.37 |
| 1536 | 1536 | | | | | | 3164 | | |
| SEQ ID | COMP ID | GTGGGGACAGGGGTGGGT | | | 5930 | 5947 | SEQ ID | ACCCACCCCTGTCCCCAC | 2.32 |
| 1537 | 1537 | | | | | | 3165 | | |
| SEQ ID | COMP ID | GAGTGGGGACAGGGGTGG | | | 5932 | 5949 | SEQ ID | CCACCCCTGTCCCCACTC | 2.82 |
| 1538 | 1538 | | | | | | 3166 | | |
| SEQ ID | COMP ID | CTGAGTGGGGACAGGGGT | | | 5934 | 5951 | SEQ ID | ACCCCTGTCCCCACTCAG | 2.26 |
| 1539 | 1539 | | | | | | 3167 | | |
| SEQ ID | COMP ID | GATCGGAGCAGCAGGTGG | 966 | 983 | 5953 | 5970 | SEQ ID | CCACCTGCTGCTCCGATC | 2.03 |
| 1540 | 1540 | | | | | | 3168 | | |
| SEQ ID | COMP ID | GTGATCGGAGCAGCAGGT | 968 | 985 | 5955 | 5972 | SEQ ID | ACCTGCTGCTCCGATCAC | 1.66 |
| 1541 | 1541 | | | | | | 3169 | | |
| SEQ ID | COMP ID | AGGTGATCGGAGCAGCAG | 970 | 987 | 5957 | 5974 | SEQ ID | CTGCTGCTCCGATCACCT | 2 |
| 1542 | 1542 | | | | | | 3170 | | |
| SEQ ID | COMP ID | GCAGGTGATCGGAGCAGC | 972 | 989 | 5959 | 5976 | SEQ ID | GCTGCTCCGATCACCTGC | 1.32 |
| 1543 | 1543 | | | | | | 3171 | | |
| SEQ ID | COMP ID | GTGCAGGTGATCGGAGCA | 974 | 991 | 5961 | 5978 | SEQ ID | TGCTCCGATCACCTGCAC | 1.62 |
| 1544 | 1544 | | | | | | 3172 | | |
| SEQ ID | COMP ID | CAGTGCAGGTGATCGGAG | 976 | 993 | 5963 | 5980 | SEQ ID | CTCCGATCACCTGCACTG | 2.12 |
| 1545 | 1545 | | | | | | 3173 | | |
| SEQ ID | COMP ID | AGCAGTGCAGGTGATCGG | 978 | 995 | 5965 | 5982 | SEQ ID | CCGATCACCTGCACTGCT | 1.58 |
| 1546 | 1546 | | | | | | 3174 | | |
| SEQ ID | COMP ID | GCAGCAGTGCAGGTGATC | 980 | 997 | 5967 | 5984 | SEQ ID | GATCACCTGCACTGCTGC | 1.83 |
| 1547 | 1547 | | | | | | 3175 | | |
| SEQ ID | COMP ID | GGGCAGCAGTGCAGGTGA | 982 | 999 | 5969 | 5986 | SEQ ID | TCACCTGCACTGCTGCCC | 2.37 |
| 1548 | 1548 | | | | | | 3176 | | |
| SEQ ID | COMP ID | GGGGGCAGCAGTGCAGGT | 984 | 1001 | 5971 | 5988 | SEQ ID | ACCTGCACTGCTGCCCCC | 2.03 |
| 1549 | 1549 | | | | | | 3177 | | |
| SEQ ID | COMP ID | TTGGGGGCAGCAGTGCAG | 986 | 1003 | 5973 | 5990 | SEQ ID | CTGCACTGCTGCCCCCAA | 1.99 |
| 1550 | 1550 | | | | | | 3178 | | |
| SEQ ID | COMP ID | TCTTGGGGGCAGCAGTGC | 988 | 1005 | 5975 | 5992 | SEQ ID | GCACTGCTGCCCCCAAGA | 1.77 |
| 1551 | 1551 | | | | | | 3179 | | |
| SEQ ID | COMP ID | TGTCTTGGGGGCAGCAGT | 990 | 1007 | 5977 | 5994 | SEQ ID | ACTGCTGCCCCCAAGACA | 1.68 |
| 1552 | 1552 | | | | | | 3180 | | |
| SEQ ID | COMP ID | AGTGTCTTGGGGGCAGCA | 992 | 1009 | 5979 | 5996 | SEQ ID | TGCTGCCCCCAAGACACT | 2.12 |
| 1553 | 1553 | | | | | | 3181 | | |
| SEQ ID | COMP ID | ACAGTGTCTTGGGGGCAG | 994 | 1011 | 5981 | 5998 | SEQ ID | CTGCCCCCAAGACACTGT | 1.93 |
| 1554 | 1554 | | | | | | 3182 | | |
| SEQ ID | COMP ID | ACACAGTGTCTTGGGGGC | 996 | 1013 | 5983 | 6000 | SEQ ID | GCCCCCAAGACACTGTGT | 2.21 |
| 1555 | 1555 | | | | | | 3183 | | |
| SEQ ID | COMP ID | ACACACAGTGTCTTGGGG | 998 | 1015 | 5985 | 6002 | SEQ ID | CCCCAAGACACTGTGTGT | 1.79 |
| 1556 | 1556 | | | | | | 3184 | | |
| SEQ ID | COMP ID | TCACACACAGTGTCTTGG | 1000 | 1017 | 5987 | 6004 | SEQ ID | CCAAGACACTGTGTGTGA | 1.39 |
| 1557 | 1557 | | | | | | 3185 | | |
| SEQ ID | COMP ID | GGTCACACACAGTGTCTT | 1002 | 1019 | 5989 | 6006 | SEQ ID | AAGACACTGTGTGTGACC | 1.72 |
| 1558 | 1558 | | | | | | 3186 | | |
| SEQ ID | COMP ID | CAGGTCACACACAGTGTC | 1004 | 1021 | 5991 | 6008 | SEQ ID | GACACTGTGTGTGACCTG | 1.43 |
| 1559 | 1559 | | | | | | 3187 | | |
| SEQ ID | COMP ID | ATCAGGTCACACACAGTG | 1006 | 1023 | 5993 | 6010 | SEQ ID | CACTGTGTGTGACCTGAT | 1.63 |
| 1560 | 1560 | | | | | | 3188 | | |
| SEQ ID | COMP ID | GGATCAGGTCACACACAG | 1008 | 1025 | 5995 | 6012 | SEQ ID | CTGTGTGTGACCTGATCC | 1.44 |
| 1561 | 1561 | | | | | | 3189 | | |
| SEQ ID | COMP ID | CTGGATCAGGTCACACAC | 1010 | 1027 | 5997 | 6014 | SEQ ID | GTGTGTGACCTGATCCAG | 1.15 |
| 1562 | 1562 | | | | | | 3190 | | |
| SEQ ID | COMP ID | CTCTGGATCAGGTCACAC | 1012 | 1029 | 5999 | 6016 | SEQ ID | GTGTGACCTGATCCAGAG | 1.56 |
| 1563 | 1563 | | | | | | 3191 | | |
| SEQ ID | COMP ID | TACTCTGGATCAGGTCAC | 1014 | 1031 | 6001 | 6018 | SEQ ID | GTGACCTGATCCAGAGTA | 1.45 |
| 1564 | 1564 | | | | | | 3192 | | |
| SEQ ID | COMP ID | CTTACTCTGGATCAGGTC | 1016 | 1033 | 6003 | 6020 | SEQ ID | GACCTGATCCAGAGTAAG | 1.51 |
| 1565 | 1565 | | | | | | 3193 | | |
| SEQ ID | COMP ID | CACTTACTCTGGATCAGG | 1018 | 1035 | 6005 | 6022 | SEQ ID | CCTGATCCAGAGTAAGTG | 1.39 |
| 1566 | 1566 | | | | | | 3194 | | |
| SEQ ID | COMP ID | GGCACTTACTCTGGATCA | 1020 | 1037 | 6007 | 6024 | SEQ ID | TGATCCAGAGTAAGTGCC | 1.28 |
| 1567 | 1567 | | | | | | 3195 | | |
| SEQ ID | COMP ID | GAGGCACTTACTCTGGAT | 1022 | 1039 | 6009 | 6026 | SEQ ID | ATCCAGAGTAAGTGCCTC | 1.53 |
| 1568 | 1568 | | | | | | 3196 | | |
| SEQ ID | COMP ID | GAGAGGCACTTACTCTGG | 1024 | 1041 | 6011 | 6028 | SEQ ID | CCAGAGTAAGTGCCTCTC | 1.5 |
| 1569 | 1569 | | | | | | 3197 | | |
| SEQ ID | COMP ID | TGGAGAGGCACTTACTCT | 1026 | 1043 | 6013 | 6030 | SEQ ID | AGAGTAAGTGCCTCTCCA | 1.39 |
| 1570 | 1570 | | | | | | 3198 | | |
| SEQ ID | COMP ID | CTTGGAGAGGCACTTACT | 1028 | 1045 | 6015 | 6032 | SEQ ID | AGTAAGTGCCTCTCCAAG | 1.37 |
| 1571 | 1571 | | | | | | 3199 | | |
| SEQ ID | COMP ID | TCCTTGGAGAGGCACTTA | 1030 | 1047 | 6017 | 6034 | SEQ ID | TAAGTGCCTCTCCAAGGA | 1.3 |
| 1572 | 1572 | | | | | | 3200 | | |
| SEQ ID | COMP ID | TCTCCTTGGAGAGGCACT | 1032 | 1049 | 6019 | 6036 | SEQ ID | AGTGCCTCTCCAAGGAGA | 1.26 |
| 1573 | 1573 | | | | | | 3201 | | |
| SEQ ID | COMP ID | GTTCTCCTTGGAGAGGCA | 1034 | 1051 | 6021 | 6038 | SEQ ID | TGCCTCTCCAAGGAGAAC | 1.17 |
| 1574 | 1574 | | | | | | 3202 | | |
| SEQ ID | COMP ID | GCGTTCTCCTTGGAGAGG | 1036 | 1053 | 6023 | 6040 | SEQ ID | CCTCTCCAAGGAGAACGC | 1.65 |
| 1575 | 1575 | | | | | | 3203 | | |
| SEQ ID | COMP ID | TAGCGTTCTCCTTGGAGA | 1038 | 1055 | 6025 | 6042 | SEQ ID | TCTCCAAGGAGAACGCTA | 1.36 |
| 1576 | 1576 | | | | | | 3204 | | |
| SEQ ID | COMP ID | GGTAGCGTTCTCCTTGGA | 1040 | 1057 | 6027 | 6044 | SEQ ID | TCCAAGGAGAACGCTACC | 1.86 |
| 1577 | 1577 | | | | | | 3205 | | |
| SEQ ID | COMP ID | GTGGTAGCGTTCTCCTTG | 1042 | 1059 | 6029 | 6046 | SEQ ID | CAAGGAGAACGCTACCAC | 1.81 |
| 1578 | 1578 | | | | | | 3206 | | |
| SEQ ID | COMP ID | CCGTGGTAGCGTTCTCCT | 1044 | 1061 | 6031 | 6048 | SEQ ID | AGGAGAACGCTACCACGG | 1.52 |
| 1579 | 1579 | | | | | | 3207 | | |
| SEQ ID | COMP ID | GTCCGTGGTAGCGTTCTC | 1046 | 1063 | 6033 | 6050 | SEQ ID | GAGAACGCTACCACGGAC | 1.3 |
| 1580 | 1580 | | | | | | 3208 | | |
| SEQ ID | COMP ID | AGGTCCGTGGTAGCGTTC | 1048 | 1065 | 6035 | 6052 | SEQ ID | GAACGCTACCACGGACCT | 1.25 |
| 1581 | 1581 | | | | | | 3209 | | |
| SEQ ID | COMP ID | GGAGGTCCGTGGTAGCGT | 1050 | 1067 | 6037 | 6054 | SEQ ID | ACGCTACCACGGACCTCC | 2.11 |
| 1582 | 1582 | | | | | | 3210 | | |
| SEQ ID | COMP ID | GAGGAGGTCCGTGGTAGC | 1052 | 1069 | 6039 | 6056 | SEQ ID | GCTACCACGGACCTCCTC | 2.26 |
| 1583 | 1583 | | | | | | 3211 | | |
| SEQ ID | COMP ID | GTGAGGAGGTCCGTGGTA | 1054 | 1071 | 6041 | 6058 | SEQ ID | TACCACGGACCTCCTCAC | 1.9 |
| 1584 | 1584 | | | | | | 3212 | | |
| SEQ ID | COMP ID | TAGTGAGGAGGTCCGTGG | 1056 | 1073 | 6043 | 6060 | SEQ ID | CCACGGACCTCCTCACTA | 1.88 |
| 1585 | 1585 | | | | | | 3213 | | |
| SEQ ID | COMP ID | CTTAGTGAGGAGGTCCGT | 1058 | 1075 | 6045 | 6062 | SEQ ID | ACGGACCTCCTCACTAAG | 1.88 |
| 1586 | 1586 | | | | | | 3214 | | |
| SEQ ID | COMP ID | AGCTTAGTGAGGAGGTCC | 1060 | 1077 | 6047 | 6064 | SEQ ID | GGACCTCCTCACTAAGCT | 1.83 |
| 1587 | 1587 | | | | | | 3215 | | |
| SEQ ID | COMP ID | GCAGCTTAGTGAGGAGGT | 1062 | 1079 | 6049 | 6066 | SEQ ID | ACCTCCTCACTAAGCTGC | 2.35 |
| 1588 | 1588 | | | | | | 3216 | | |
| SEQ ID | COMP ID | AGGCAGCTTAGTGAGGAG | 1064 | 1081 | 6051 | 6068 | SEQ ID | CTCCTCACTAAGCTGCCT | 1.97 |
| 1589 | 1589 | | | | | | 3217 | | |
| SEQ ID | COMP ID | GCAGGCAGCTTAGTGAGG | 1066 | 1083 | 6053 | 6070 | SEQ ID | CCTCACTAAGCTGCCTGC | 2.13 |
| 1590 | 1590 | | | | | | 3218 | | |
| SEQ ID | COMP ID | GCGCAGGCAGCTTAGTGA | 1068 | 1085 | 6055 | 6072 | SEQ ID | TCACTAAGCTGCCTGCGC | 2.16 |
| 1591 | 1591 | | | | | | 3219 | | |
| SEQ ID | COMP ID | GTGCGCAGGCAGCTTAGT | 1070 | 1087 | 6057 | 6074 | SEQ ID | ACTAAGCTGCCTGCGCAC | 1.48 |
| 1592 | 1592 | | | | | | 3220 | | |
| SEQ ID | COMP ID | GTGTGCGCAGGCAGCTTA | 1072 | 1089 | 6059 | 6076 | SEQ ID | TAAGCTGCCTGCGCACAC | 1.67 |
| 1593 | 1593 | | | | | | 3221 | | |
| SEQ ID | COMP ID | CTGTGTGCGCAGGCAGCT | 1074 | 1091 | 6061 | 6078 | SEQ ID | AGCTGCCTGCGCACACAG | 1.67 |
| 1594 | 1594 | | | | | | 3222 | | |
| SEQ ID | COMP ID | TGCACCCTGCCTCTGGTA | | | 6080 | 6097 | SEQ ID | TACCAGAGGCAGGGTGCA | 1.72 |
| 1595 | 1595 | | | | | | 3223 | | |
| SEQ ID | COMP ID | TCTGCACCCTGCCTCTGG | | | 6082 | 6099 | SEQ ID | CCAGAGGCAGGGTGCAGA | 1.74 |
| 1596 | 1596 | | | | | | 3224 | | |
| SEQ ID | COMP ID | TATCTGCACCCTGCCTCT | | | 6084 | 6101 | SEQ ID | AGAGGCAGGGTGCAGATA | 1.38 |
| 1597 | 1597 | | | | | | 3225 | | |
| SEQ ID | COMP ID | TGTATCTGCACCCTGCCT | | | 6086 | 6103 | SEQ ID | AGGCAGGGTGCAGATACA | 1.36 |
| 1598 | 1598 | | | | | | 3226 | | |
| SEQ ID | COMP ID | CCTGTATCTGCACCCTGC | | | 6088 | 6105 | SEQ ID | GCAGGGTGCAGATACAGG | 1.62 |
| 1599 | 1599 | | | | | | 3227 | | |
| SEQ ID | COMP ID | CCCCTGTATCTGCACCCT | | | 6090 | 6107 | SEQ ID | AGGGTGCAGATACAGGGG | 1.31 |
| 1600 | 1600 | | | | | | 3228 | | |
| SEQ ID | COMP ID | CACCCCTGTATCTGCACC | | | 6092 | 6109 | SEQ ID | GGTGCAGATACAGGGGTG | 1.13 |
| 1601 | 1601 | | | | | | 3229 | | |
| SEQ ID | COMP ID | CCCACCCCTGTATCTGCA | | | 6094 | 6111 | SEQ ID | TGCAGATACAGGGGTGGG | 1.11 |
| 1602 | 1602 | | | | | | 3230 | | |
| SEQ ID | COMP ID | GCCCCACCCCTGTATCTG | | | 6096 | 6113 | SEQ ID | CAGATACAGGGGTGGGGC | 1.38 |
| 1603 | 1603 | | | | | | 3231 | | |
| SEQ ID | COMP ID | GGGCCCCACCCCTGTATC | | | 6098 | 6115 | SEQ ID | GATACAGGGGTGGGGCCC | 1.42 |
| 1604 | 1604 | | | | | | 3232 | | |
| SEQ ID | COMP ID | GGGGGCCCCACCCCTGTA | | | 6100 | 6117 | SEQ ID | TACAGGGGTGGGGCCCCC | 1.14 |
| 1605 | 1605 | | | | | | 3233 | | |
| SEQ ID | COMP ID | AAGGGGGCCCCACCCCTG | | | 6102 | 6119 | SEQ ID | CAGGGGTGGGGCCCCCTT | 1.16 |
| 1606 | 1606 | | | | | | 3234 | | |
| SEQ ID | COMP ID | GAAAGGGGGCCCCACCCC | | | 6104 | 6121 | SEQ ID | GGGGTGGGGCCCCCTTTC | 1.34 |
| 1607 | 1607 | | | | | | 3235 | | |
| SEQ ID | COMP ID | AGGAAAGGGGGCCCCACC | | | 6106 | 6123 | SEQ ID | GGTGGGGCCCCCTTTCCT | 1.74 |
| 1608 | 1608 | | | | | | 3236 | | |
| SEQ ID | COMP ID | GGAGGAAAGGGGGCCCCA | | | 6108 | 6125 | SEQ ID | TGGGGCCCCCTTTCCTCC | 2.14 |
| 1609 | 1609 | | | | | | 3237 | | |
| SEQ ID | COMP ID | AGGGAGGAAAGGGGGCCC | | | 6110 | 6127 | SEQ ID | GGGCCCCCTTTCCTCCCT | 2.26 |
| 1610 | 1610 | | | | | | 3238 | | |
| SEQ ID | COMP ID | AAAGGGAGGAAAGGGGGC | | | 6112 | 6129 | SEQ ID | GCCCCCTTTCCTCCCTTT | 2.14 |
| 1611 | 1611 | | | | | | 3239 | | |
| SEQ ID | COMP ID | TAAAAGGGAGGAAAGGGG | | | 6114 | 6131 | SEQ ID | CCCCTTTCCTCCCTTTTA | 2.13 |
| 1612 | 1612 | | | | | | 3240 | | |
| SEQ ID | COMP ID | CCTAAAAGGGAGGAAAGG | | | 6116 | 6133 | SEQ ID | CCTTTCCTCCCTTTTAGG | 1.65 |
| 1613 | 1613 | | | | | | 3241 | | |
| SEQ ID | COMP ID | GGCCTAAAAGGGAGGAAA | | | 6118 | 6135 | SEQ ID | TTTCCTCCCTTTTAGGCC | 2.24 |
| 1614 | 1614 | | | | | | 3242 | | |
| SEQ ID | COMP ID | CAGGCCTAAAAGGGAGGA | | | 6120 | 6137 | SEQ ID | TCCTCCCTTTTAGGCCTG | 1.97 |
| 1615 | 1615 | | | | | | 3243 | | |
| SEQ ID | COMP ID | GCCAGGCCTAAAAGGGAG | | | 6122 | 6139 | SEQ ID | CTCCCTTTTAGGCCTGGC | 1.76 |
| 1616 | 1616 | | | | | | 3244 | | |
| SEQ ID | COMP ID | AGGCCAGGCCTAAAAGGG | | | 6124 | 6141 | SEQ ID | CCCTTTTAGGCCTGGCCT | 1.76 |
| 1617 | 1617 | | | | | | 3245 | | |
| SEQ ID | COMP ID | TAAGGCCAGGCCTAAAAG | | | 6126 | 6143 | SEQ ID | CTTTTAGGCCTGGCCTTA | 1.9 |
| 1618 | 1618 | | | | | | 3246 | | |
| SEQ ID | COMP ID | CCTAAGGCCAGGCCTAAA | | | 6128 | 6145 | SEQ ID | TTTAGGCCTGGCCTTAGG | 0.98 |
| 1619 | 1619 | | | | | | 3247 | | |
| SEQ ID | COMP ID | ATCCTAAGGCCAGGCCTA | | | 6130 | 6147 | SEQ ID | TAGGCCTGGCCTTAGGAT | 1.56 |
| 1620 | 1620 | | | | | | 3248 | | |
| SEQ ID | COMP ID | TGATCCTAAGGCCAGGCC | | | 6132 | 6149 | SEQ ID | GGCCTGGCCTTAGGATCA | 1.63 |
| 1621 | 1621 | | | | | | 3249 | | |
| SEQ ID | COMP ID | AGTGATCCTAAGGCCAGG | | | 6134 | 6151 | SEQ ID | CCTGGCCTTAGGATCACT | 2.63 |
| 1622 | 1622 | | | | | | 3250 | | |
| SEQ ID | COMP ID | GCAGTGATCCTAAGGCCA | | | 6136 | 6153 | SEQ ID | TGGCCTTAGGATCACTGC | 2.04 |
| 1623 | 1623 | | | | | | 3251 | | |
| SEQ ID | COMP ID | TTGCAGTGATCCTAAGGC | | | 6138 | 6155 | SEQ ID | GCCTTAGGATCACTGCAA | 1.74 |
| 1624 | 1624 | | | | | | 3252 | | |
| SEQ ID | COMP ID | CCTTGCAGTGATCCTAAG | | | 6140 | 6157 | SEQ ID | CTTAGGATCACTGCAAGG | 1.33 |
| 1625 | 1625 | | | | | | 3253 | | |
| SEQ ID | COMP ID | CACCTTGCAGTGATCCTA | | | 6142 | 6159 | SEQ ID | TAGGATCACTGCAAGGTG | 1.55 |
| 1626 | 1626 | | | | | | 3254 | | |
| SEQ ID | COMP ID | ACCACCTTGCAGTGATCC | | | 6144 | 6161 | SEQ ID | GGATCACTGCAAGGTGGT | 1.42 |
| 1627 | 1627 | | | | | | 3255 | | |
| SEQ ID | COMP ID | ACACCACCTTGCAGTGAT | | | 6146 | 6163 | SEQ ID | ATCACTGCAAGGTGGTGT | 1.38 |
| 1628 | 1628 | | | | | | 3256 | | |
| SEQ ID | COMP ID | GGCACTGGGGACCCTCAG | | | 6227 | 6244 | SEQ ID | CTGAGGGTCCCCAGTGCC | 1.18 |
| 1629 | 1629 | | | | | | 3257 | | |
| SEQ ID | COMP ID | GTGGCACTGGGGACCCTC | | | 6229 | 6246 | SEQ ID | GAGGGTCCCCAGTGCCAC | 1.87 |
| 1630 | 1630 | | | | | | 3258 | | |
| SEQ ID | COMP ID | AAGTGGCACTGGGGACCC | | | 6231 | 6248 | SEQ ID | GGGTCCCCAGTGCCACTT | 1.76 |
| 1631 | 1631 | | | | | | 3259 | | |
| SEQ ID | COMP ID | AGAAGTGGCACTGGGGAC | | | 6233 | 6250 | SEQ ID | GTCCCCAGTGCCACTTCT | 1.3 |
| 1632 | 1632 | | | | | | 3260 | | |
| SEQ ID | COMP ID | TCAGAAGTGGCACTGGGG | | | 6235 | 6252 | SEQ ID | CCCCAGTGCCACTTCTGA | 1.77 |
| 1633 | 1633 | | | | | | 3261 | | |
| SEQ ID | COMP ID | GGTCAGAAGTGGCACTGG | | | 6237 | 6254 | SEQ ID | CCAGTGCCACTTCTGACC | 1.03 |
| 1634 | 1634 | | | | | | 3262 | | |
| SEQ ID | COMP ID | CAGGTCAGAAGTGGCACT | | | 6239 | 6256 | SEQ ID | AGTGCCACTTCTGACCTG | 1.5 |
| 1635 | 1635 | | | | | | 3263 | | |
| SEQ ID | COMP ID | GACAGGTCAGAAGTGGCA | | | 6241 | 6258 | SEQ ID | TGCCACTTCTGACCTGTC | 1.33 |
| 1636 | 1636 | | | | | | 3264 | | |
| SEQ ID | COMP ID | AGGACAGGTCAGAAGTGG | | | 6243 | 6260 | SEQ ID | CCACTTCTGACCTGTCCT | 1.75 |
| 1637 | 1637 | | | | | | 3265 | | |
| SEQ ID | COMP ID | AGAGGACAGGTCAGAAGT | | | 6245 | 6262 | SEQ ID | ACTTCTGACCTGTCCTCT | 1.75 |
| 1638 | 1638 | | | | | | 3266 | | |
| SEQ ID | COMP ID | AGAGAGGACAGGTCAGAA | | | 6247 | 6264 | SEQ ID | TTCTGACCTGTCCTCTCT | 2.2 |
| 1639 | 1639 | | | | | | 3267 | | |
| SEQ ID | COMP ID | GCAGAGAGGACAGGTCAG | | | 6249 | 6266 | SEQ ID | CTGACCTGTCCTCTCTGC | 1.36 |
| 1640 | 1640 | | | | | | 3268 | | |
| SEQ ID | COMP ID | AAGCAGAGAGGACAGGTC | | | 6251 | 6268 | SEQ ID | GACCTGTCCTCTCTGCTT | 1.35 |
| 1641 | 1641 | | | | | | 3269 | | |
| SEQ ID | COMP ID | GGAAGCAGAGAGGACAGG | | | 6253 | 6270 | SEQ ID | CCTGTCCTCTCTGCTTCC | 1.41 |
| 1642 | 1642 | | | | | | 3270 | | |
| SEQ ID | COMP ID | AGGGAAGCAGAGAGGACA | | | 6255 | 6272 | SEQ ID | TGTCCTCTCTGCTTCCCT | 1.51 |
| 1643 | 1643 | | | | | | 3271 | | |
| SEQ ID | COMP ID | TGAGGGAAGCAGAGAGGA | | | 6257 | 6274 | SEQ ID | TCCTCTCTGCTTCCCTCA | 1.87 |
| 1644 | 1644 | | | | | | 3272 | | |
| SEQ ID | COMP ID | TGTGAGGGAAGCAGAGAG | | | 6259 | 6276 | SEQ ID | CTCTCTGCTTCCCTCACA | 1.55 |
| 1645 | 1645 | | | | | | 3273 | | |
| SEQ ID | COMP ID | CACATTTCACATCCCCCA | 1092 | 1109 | 6278 | 6295 | SEQ ID | TGGGGGATGTGAAATGTG | 0.93 |
| 1646 | 1646 | | | | | | 3274 | | |
| SEQ ID | COMP ID | GTCACATTTCACATCCCC | 1094 | 1111 | 6280 | 6297 | SEQ ID | GGGGATGTGAAATGTGAC | 1.29 |
| 1647 | 1647 | | | | | | 3275 | | |
| SEQ ID | COMP ID | ATGTCACATTTCACATCC | 1096 | 1113 | 6282 | 6299 | SEQ ID | GGATGTGAAATGTGACAT | 1.64 |
| 1648 | 1648 | | | | | | 3276 | | |
| SEQ ID | COMP ID | CCATGTCACATTTCACAT | 1098 | 1115 | 6284 | 6301 | SEQ ID | ATGTGAAATGTGACATGG | 1.52 |
| 1649 | 1649 | | | | | | 3277 | | |
| SEQ ID | COMP ID | CTCCATGTCACATTTCAC | 1100 | 1117 | 6286 | 6303 | SEQ ID | GTGAAATGTGACATGGAG | 1.44 |
| 1650 | 1650 | | | | | | 3278 | | |
| SEQ ID | COMP ID | ACCTCCATGTCACATTTC | 1102 | 1119 | 6288 | 6305 | SEQ ID | GAAATGTGACATGGAGGT | 1.54 |
| 1651 | 1651 | | | | | | 3279 | | |
| SEQ ID | COMP ID | TCACCTCCATGTCACATT | 1104 | 1121 | 6290 | 6307 | SEQ ID | AATGTGACATGGAGGTGA | 1.1 |
| 1652 | 1652 | | | | | | 3280 | | |
| SEQ ID | COMP ID | GCTCACCTCCATGTCACA | 1106 | 1123 | 6292 | 6309 | SEQ ID | TGTGACATGGAGGTGAGC | 0.93 |
| 1653 | 1653 | | | | | | 3281 | | |
| SEQ ID | COMP ID | CAGCTCACCTCCATGTCA | 1108 | 1125 | 6294 | 6311 | SEQ ID | TGACATGGAGGTGAGCTG | 1.21 |
| 1654 | 1654 | | | | | | 3282 | | |
| SEQ ID | COMP ID | GGCAGCTCACCTCCATGT | 1110 | 1127 | 6296 | 6313 | SEQ ID | ACATGGAGGTGAGCTGCC | 0.93 |
| 1655 | 1655 | | | | | | 3283 | | |
| SEQ ID | COMP ID | TGGGCAGCTCACCTCCAT | 1112 | 1129 | 6298 | 6315 | SEQ ID | ATGGAGGTGAGCTGCCCA | 1.04 |
| 1656 | 1656 | | | | | | 3284 | | |
| SEQ ID | COMP ID | TCTGGGCAGCTCACCTCC | 1114 | 1131 | 6300 | 6317 | SEQ ID | GGAGGTGAGCTGCCCAGA | 1.3 |
| 1657 | 1657 | | | | | | 3285 | | |
| SEQ ID | COMP ID | CATCTGGGCAGCTCACCT | 1116 | 1133 | 6302 | 6319 | SEQ ID | AGGTGAGCTGCCCAGATG | 1.63 |
| 1658 | 1658 | | | | | | 3286 | | |
| SEQ ID | COMP ID | GCCATCTGGGCAGCTCAC | 1118 | 1135 | 6304 | 6321 | SEQ ID | GTGAGCTGCCCAGATGGC | 1.04 |
| 1659 | 1659 | | | | | | 3287 | | |
| SEQ ID | COMP ID | TAGCCATCTGGGCAGCTC | 1120 | 1137 | 6306 | 6323 | SEQ ID | GAGCTGCCCAGATGGCTA | 1.24 |
| 1660 | 1660 | | | | | | 3288 | | |
| SEQ ID | COMP ID | TATAGCCATCTGGGCAGC | 1122 | 1139 | 6308 | 6325 | SEQ ID | GCTGCCCAGATGGCTATA | 1.19 |
| 1661 | 1661 | | | | | | 3289 | | |
| SEQ ID | COMP ID | GGTATAGCCATCTGGGCA | 1124 | 1141 | 6310 | 6327 | SEQ ID | TGCCCAGATGGCTATACC | no data |
| 1662 | 1662 | | | | | | 3290 | | |
| SEQ ID | COMP ID | CAGGTATAGCCATCTGGG | 1126 | 1143 | 6312 | 6329 | SEQ ID | CCCAGATGGCTATACCTG | 1.15 |
| 1663 | 1663 | | | | | | 3291 | | |
| SEQ ID | COMP ID | AGCAGGTATAGCCATCTG | 1128 | 1145 | 6314 | 6331 | SEQ ID | CAGATGGCTATACCTGCT | 1.34 |
| 1664 | 1664 | | | | | | 3292 | | |
| SEQ ID | COMP ID | GCAGCAGGTATAGCCATC | 1130 | 1147 | 6316 | 6333 | SEQ ID | GATGGCTATACCTGCTGC | 1.15 |
| 1665 | 1665 | | | | | | 3293 | | |
| SEQ ID | COMP ID | CGGCAGCAGGTATAGCCA | 1132 | 1149 | 6318 | 6335 | SEQ ID | TGGCTATACCTGCTGCCG | 1.35 |
| 1666 | 1666 | | | | | | 3294 | | |
| SEQ ID | COMP ID | GACGGCAGCAGGTATAGC | 1134 | 1151 | 6320 | 6337 | SEQ ID | GCTATACCTGCTGCCGTC | 1.69 |
| 1667 | 1667 | | | | | | 3295 | | |
| SEQ ID | COMP ID | TAGACGGCAGCAGGTATA | 1136 | 1153 | 6322 | 6339 | SEQ ID | TATACCTGCTGCCGTCTA | 1.38 |
| 1668 | 1668 | | | | | | 3296 | | |
| SEQ ID | COMP ID | TGTAGACGGCAGCAGGTA | 1138 | 1155 | 6324 | 6341 | SEQ ID | TACCTGCTGCCGTCTACA | 1.68 |
| 1669 | 1669 | | | | | | 3297 | | |
| SEQ ID | COMP ID | ACTGTAGACGGCAGCAGG | 1140 | 1157 | 6326 | 6343 | SEQ ID | CCTGCTGCCGTCTACAGT | 1.34 |
| 1670 | 1670 | | | | | | 3298 | | |
| SEQ ID | COMP ID | CGACTGTAGACGGCAGCA | 1142 | 1159 | 6328 | 6345 | SEQ ID | TGCTGCCGTCTACAGTCG | 1.4 |
| 1671 | 1671 | | | | | | 3299 | | |
| SEQ ID | COMP ID | CCCGACTGTAGACGGCAG | 1144 | 1161 | 6330 | 6347 | SEQ ID | CTGCCGTCTACAGTCGGG | 1.22 |
| 1672 | 1672 | | | | | | 3300 | | |
| SEQ ID | COMP ID | CCCCCGACTGTAGACGGC | 1146 | 1163 | 6332 | 6349 | SEQ ID | GCCGTCTACAGTCGGGGG | 1.24 |
| 1673 | 1673 | | | | | | 3301 | | |
| SEQ ID | COMP ID | GGCCCCCGACTGTAGACG | 1148 | 1165 | 6334 | 6351 | SEQ ID | CGTCTACAGTCGGGGGCC | 1.28 |
| 1674 | 1674 | | | | | | 3302 | | |
| SEQ ID | COMP ID | CAGGCCCCCGACTGTAGA | 1150 | 1167 | 6336 | 6353 | SEQ ID | TCTACAGTCGGGGGCCTG | 1.47 |
| 1675 | 1675 | | | | | | 3303 | | |
| SEQ ID | COMP ID | CCCAGGCCCCCGACTGTA | 1152 | 1169 | 6338 | 6355 | SEQ ID | TACAGTCGGGGGCCTGGG | 1.16 |
| 1676 | 1676 | | | | | | 3304 | | |
| SEQ ID | COMP ID | GCCCCAGGCCCCCGACTG | 1154 | 1171 | 6340 | 6357 | SEQ ID | CAGTCGGGGGCCTGGGGC | 1.6 |
| 1677 | 1677 | | | | | | 3305 | | |
| SEQ ID | COMP ID | CAGCCCCAGGCCCCCGAC | 1156 | 1173 | 6342 | 6359 | SEQ ID | GTCGGGGGCCTGGGGCTG | 1.19 |
| 1678 | 1678 | | | | | | 3306 | | |
| SEQ ID | COMP ID | AGCAGCCCCAGGCCCCCG | 1158 | 1175 | 6344 | 6361 | SEQ ID | CGGGGGCCTGGGGCTGCT | 1.54 |
| 1679 | 1679 | | | | | | 3307 | | |
| SEQ ID | COMP ID | GCAGCAGCCCCAGGCCCC | 1160 | 1177 | 6346 | 6363 | SEQ ID | GGGGCCTGGGGCTGCTGC | 1.27 |
| 1680 | 1680 | | | | | | 3308 | | |
| SEQ ID | COMP ID | GGGCAGCAGCCCCAGGCC | 1162 | 1179 | 6348 | 6365 | SEQ ID | GGCCTGGGGCTGCTGCCC | 1.55 |
| 1681 | 1681 | | | | | | 3309 | | |
| SEQ ID | COMP ID | AAGGGCAGCAGCCCCAGG | 1164 | 1181 | 6350 | 6367 | SEQ ID | CCTGGGGCTGCTGCCCTT | 1.04 |
| 1682 | 1682 | | | | | | 3310 | | |
| SEQ ID | COMP ID | AAAAGGGCAGCAGCCCCA | 1166 | 1183 | 6352 | 6369 | SEQ ID | TGGGGCTGCTGCCCTTTT | 1.3 |
| 1683 | 1683 | | | | | | 3311 | | |
| SEQ ID | COMP ID | GTAAAAGGGCAGCAGCCC | 1168 | 1185 | 6354 | 6371 | SEQ ID | GGGCTGCTGCCCTTTTAC | 1.6 |
| 1684 | 1684 | | | | | | 3312 | | |
| SEQ ID | COMP ID | GGGTAAAAGGGCAGCAGC | 1170 | 1187 | 6356 | 6373 | SEQ ID | GCTGCTGCCCTTTTACCC | 2.89 |
| 1685 | 1685 | | | | | | 3313 | | |
| SEQ ID | COMP ID | CTGGGTAAAAGGGCAGCA | 1172 | 1189 | 6358 | 6375 | SEQ ID | TGCTGCCCTTTTACCCAG | 2.6 |
| 1686 | 1686 | | | | | | 3314 | | |
| SEQ ID | COMP ID | ACCTGGGTAAAAGGGCAG | | | 6360 | 6377 | SEQ ID | CTGCCCTTTTACCCAGGT | 1.27 |
| 1687 | 1687 | | | | | | 3315 | | |
| SEQ ID | COMP ID | GTACCTGGGTAAAAGGGC | | | 6362 | 6379 | SEQ ID | GCCCTTTTACCCAGGTAC | 1.55 |
| 1688 | 1688 | | | | | | 3316 | | |
| SEQ ID | COMP ID | GGGTACCTGGGTAAAAGG | | | 6364 | 6381 | SEQ ID | CCTTTTACCCAGGTACCC | 2.16 |
| 1689 | 1689 | | | | | | 3317 | | |
| SEQ ID | COMP ID | CTGGGTACCTGGGTAAAA | | | 6366 | 6383 | SEQ ID | TTTTACCCAGGTACCCAG | 1.55 |
| 1690 | 1690 | | | | | | 3318 | | |
| SEQ ID | COMP ID | CCCTGGGTACCTGGGTAA | | | 6368 | 6385 | SEQ ID | TTACCCAGGTACCCAGGG | no data |
| 1691 | 1691 | | | | | | 3319 | | |
| SEQ ID | COMP ID | ACCCCTGGGTACCTGGGT | | | 6370 | 6387 | SEQ ID | ACCCAGGTACCCAGGGGT | 1.57 |
| 1692 | 1692 | | | | | | 3320 | | |
| SEQ ID | COMP ID | CCACCCCTGGGTACCTGG | | | 6372 | 6389 | SEQ ID | CCAGGTACCCAGGGGTGG | 1.09 |
| 1693 | 1693 | | | | | | 3321 | | |
| SEQ ID | COMP ID | CGCCACCCCTGGGTACCT | | | 6374 | 6391 | SEQ ID | AGGTACCCAGGGGTGGCG | 1.24 |
| 1694 | 1694 | | | | | | 3322 | | |
| SEQ ID | COMP ID | CCCGCCACCCCTGGGTAC | | | 6376 | 6393 | SEQ ID | GTACCCAGGGGTGGGGG | 1.28 |
| 1695 | 1695 | | | | | | 3323 | | |
| SEQ ID | COMP ID | CACCCGCCACCCCTGGGT | | | 6378 | 6395 | SEQ ID | ACCCAGGGGTGGCGGGTG | 1.24 |
| 1696 | 1696 | | | | | | 3324 | | |
| SEQ ID | COMP ID | CCCACCCGCCACCCCTGG | | | 6380 | 6397 | SEQ ID | CCAGGGGTGGCGGGTGGG | 1.21 |
| 1697 | 1697 | | | | | | 3325 | | |
| SEQ ID | COMP ID | CACCCACCCGCCACCCCT | | | 6382 | 6399 | SEQ ID | AGGGGTGGCGGGTGGGTG | 1.13 |
| 1698 | 1698 | | | | | | 3326 | | |
| SEQ ID | COMP ID | CCCACCCACCCGCCACCC | | | 6384 | 6401 | SEQ ID | GGGTGGGGGGTGGGTGGG | 1.11 |
| 1699 | 1699 | | | | | | 3327 | | |
| SEQ ID | COMP ID | AGCCCACCCACCCGCCAC | | | 6386 | 6403 | SEQ ID | GTGGCGGGTGGGTGGGCT | 0.97 |
| 1700 | 1700 | | | | | | 3328 | | |
| SEQ ID | COMP ID | TCAGCCCACCCACCCGCC | | | 6388 | 6405 | SEQ ID | GGCGGGTGGGTGGGCTGA | 1.16 |
| 1701 | 1701 | | | | | | 3329 | | |
| SEQ ID | COMP ID | GCTCAGCCCACCCACCCG | | | 6390 | 6407 | SEQ ID | CGGGTGGGTGGGCTGAGC | 0.99 |
| 1702 | 1702 | | | | | | 3330 | | |
| SEQ ID | COMP ID | GTGCTCAGCCCACCCACC | | | 6392 | 6409 | SEQ ID | GGTGGGTGGGCTGAGCAC | 1.24 |
| 1703 | 1703 | | | | | | 3331 | | |
| SEQ ID | COMP ID | CTGTGCTCAGCCCACCCA | | | 6394 | 6411 | SEQ ID | TGGGTGGGCTGAGCACAG | 1.54 |
| 1704 | 1704 | | | | | | 3332 | | |
| SEQ ID | COMP ID | CACTGTGCTCAGCCCACC | | | 6396 | 6413 | SEQ ID | GGTGGGCTGAGCACAGTG | 1.04 |
| 1705 | 1705 | | | | | | 3333 | | |
| SEQ ID | COMP ID | CACACTGTGCTCAGCCCA | | | 6398 | 6415 | SEQ ID | TGGGCTGAGCACAGTGTG | 1.37 |
| 1706 | 1706 | | | | | | 3334 | | |
| SEQ ID | COMP ID | GCCACACTGTGCTCAGCC | | | 6400 | 6417 | SEQ ID | GGCTGAGCACAGTGTGGC | 1.7 |
| 1707 | 1707 | | | | | | 3335 | | |
| SEQ ID | COMP ID | CTGCCACACTGTGCTCAG | | | 6402 | 6419 | SEQ ID | CTGAGCACAGTGTGGCAG | 1.54 |
| 1708 | 1708 | | | | | | 3336 | | |
| SEQ ID | COMP ID | GCCTGCCACACTGTGCTC | | | 6404 | 6421 | SEQ ID | GAGCACAGTGTGGCAGGC | 1.66 |
| 1709 | 1709 | | | | | | 3337 | | |
| SEQ ID | COMP ID | CTGCCTGCCACACTGTGC | | | 6406 | 6423 | SEQ ID | GCACAGTGTGGCAGGCAG | 1.77 |
| 1710 | 1710 | | | | | | 3338 | | |
| SEQ ID | COMP ID | GGCTGCCTGCCACACTGT | | | 6408 | 6425 | SEQ ID | ACAGTGTGGCAGGCAGCC | 1.54 |
| 1711 | 1711 | | | | | | 3339 | | |
| SEQ ID | COMP ID | GGGCCCGGCTGCCTGCCA | | | 6414 | 6431 | SEQ ID | TGGCAGGCAGCCGGGCCC | 1.76 |
| 1712 | 1712 | | | | | | 3340 | | |
| SEQ ID | COMP ID | TGGGGCCCGGCTGCCTGC | | | 6416 | 6433 | SEQ ID | GCAGGCAGCCGGGCCCCA | no data |
| 1713 | 1713 | | | | | | 3341 | | |
| SEQ ID | COMP ID | ACTGGGGCCCGGCTGCCT | | | 6418 | 6435 | SEQ ID | AGGCAGCCGGGCCCCAGT | 2.55 |
| 1714 | 1714 | | | | | | 3342 | | |
| SEQ ID | COMP ID | GCACTGGGGCCCGGCTGC | | | 6420 | 6437 | SEQ ID | GCAGCCGGGCCCCAGTGC | 2.04 |
| 1715 | 1715 | | | | | | 3343 | | |
| SEQ ID | COMP ID | GGGCACTGGGGCCCGGCT | | | 6422 | 6439 | SEQ ID | AGCCGGGCCCCAGTGCCC | 1.25 |
| 1716 | 1716 | | | | | | 3344 | | |
| SEQ ID | COMP ID | GTGGGCACTGGGGCCCGG | | | 6424 | 6441 | SEQ ID | CCGGGCCCCAGTGCCCAC | 1.68 |
| 1717 | 1717 | | | | | | 3345 | | |
| SEQ ID | COMP ID | AGGTGGGCACTGGGGCCC | | | 6426 | 6443 | SEQ ID | GGGCCCCAGTGCCCACCT | 1.58 |
| 1718 | 1718 | | | | | | 3346 | | |
| SEQ ID | COMP ID | GCAGGTGGGCACTGGGGC | | | 6428 | 6445 | SEQ ID | GCCCCAGTGCCCACCTGC | 3.33 |
| 1719 | 1719 | | | | | | 3347 | | |
| SEQ ID | COMP ID | GGGCAGGTGGGCACTGGG | | | 6430 | 6447 | SEQ ID | CCCAGTGCCCACCTGCCC | 2.92 |
| 1720 | 1720 | | | | | | 3348 | | |
| SEQ ID | COMP ID | AAGGGCAGGTGGGCACTG | | | 6432 | 6449 | SEQ ID | CAGTGCCCACCTGCCCTT | 2.69 |
| 1721 | 1721 | | | | | | 3349 | | |
| SEQ ID | COMP ID | AGAAGGGCAGGTGGGCAC | | | 6434 | 6451 | SEQ ID | GTGCCCACCTGCCCTTCT | 3.06 |
| 1722 | 1722 | | | | | | 3350 | | |
| SEQ ID | COMP ID | GAAGAAGGGCAGGTGGGC | | | 6436 | 6453 | SEQ ID | GCCCACCTGCCCTTCTTC | 2.88 |
| 1723 | 1723 | | | | | | 3351 | | |
| SEQ ID | COMP ID | ATGAAGAAGGGCAGGTGG | | | 6438 | 6455 | SEQ ID | CCACCTGCCCTTCTTCAT | 3.3 |
| 1724 | 1724 | | | | | | 3352 | | |
| SEQ ID | COMP ID | AGATGAAGAAGGGCAGGT | | | 6440 | 6457 | SEQ ID | ACCTGCCCTTCTTCATCT | 2.64 |
| 1725 | 1725 | | | | | | 3353 | | |
| SEQ ID | COMP ID | GCAGATGAAGAAGGGCAG | | | 6442 | 6459 | SEQ ID | CTGCCCTTCTTCATCTGC | 1.71 |
| 1726 | 1726 | | | | | | 3354 | | |
| SEQ ID | COMP ID | GGGCAGATGAAGAAGGGC | | | 6444 | 6461 | SEQ ID | GCCCTTCTTCATCTGCCC | 2.62 |
| 1727 | 1727 | | | | | | 3355 | | |
| SEQ ID | COMP ID | TAGGGCAGATGAAGAAGG | | | 6446 | 6463 | SEQ ID | CCTTCTTCATCTGCCCTA | 1.99 |
| 1728 | 1728 | | | | | | 3356 | | |
| SEQ ID | COMP ID | GTCCTCACAGCACACAGC | 1190 | 1207 | 6465 | 6482 | SEQ ID | GCTGTGTGCTGTGAGGAC | 1.2 |
| 1729 | 1729 | | | | | | 3357 | | |
| SEQ ID | COMP ID | TGGTCCTCACAGCACACA | 1192 | 1209 | 6467 | 6484 | SEQ ID | TGTGTGCTGTGAGGACCA | 1.44 |
| 1730 | 1730 | | | | | | 3358 | | |
| SEQ ID | COMP ID | TGTGGTCCTCACAGCACA | 1194 | 1211 | 6469 | 6486 | SEQ ID | TGTGCTGTGAGGACCACA | 1.75 |
| 1731 | 1731 | | | | | | 3359 | | |
| SEQ ID | COMP ID | TATGTGGTCCTCACAGCA | 1196 | 1213 | 6471 | 6488 | SEQ ID | TGCTGTGAGGACCACATA | 1.61 |
| 1732 | 1732 | | | | | | 3360 | | |
| SEQ ID | COMP ID | TGTATGTGGTCCTCACAG | 1198 | 1215 | 6473 | 6490 | SEQ ID | CTGTGAGGACCACATACA | 2.24 |
| 1733 | 1733 | | | | | | 3361 | | |
| SEQ ID | COMP ID | AGTGTATGTGGTCCTCAC | 1200 | 1217 | 6475 | 6492 | SEQ ID | GTGAGGACCACATACACT | 2.42 |
| 1734 | 1734 | | | | | | 3362 | | |
| SEQ ID | COMP ID | GCAGTGTATGTGGTCCTC | 1202 | 1219 | 6477 | 6494 | SEQ ID | GAGGACCACATACACTGC | 2.48 |
| 1735 | 1735 | | | | | | 3363 | | |
| SEQ ID | COMP ID | CAGCAGTGTATGTGGTCC | 1204 | 1221 | 6479 | 6496 | SEQ ID | GGACCACATACACTGCTG | 2.26 |
| 1736 | 1736 | | | | | | 3364 | | |
| SEQ ID | COMP ID | GACAGCAGTGTATGTGGT | 1206 | 1223 | 6481 | 6498 | SEQ ID | ACCACATACACTGCTGTC | 1.63 |
| 1737 | 1737 | | | | | | 3365 | | |
| SEQ ID | COMP ID | GGGACAGCAGTGTATGTG | 1208 | 1225 | 6483 | 6500 | SEQ ID | CACATACACTGCTGTCCC | 2.73 |
| 1738 | 1738 | | | | | | 3366 | | |
| SEQ ID | COMP ID | GCGGGACAGCAGTGTATG | 1210 | 1227 | 6485 | 6502 | SEQ ID | CATACACTGCTGTCCCGC | 1.46 |
| 1739 | 1739 | | | | | | 3367 | | |
| SEQ ID | COMP ID | CCGCGGGACAGCAGTGTA | 1212 | 1229 | 6487 | 6504 | SEQ ID | TACACTGCTGTCCCGCGG | 1.42 |
| 1740 | 1740 | | | | | | 3368 | | |
| SEQ ID | COMP ID | CCCCGCGGGACAGCAGTG | 1214 | 1231 | 6489 | 6506 | SEQ ID | CACTGCTGTCCCGCGGGG | 1.69 |
| 1741 | 1741 | | | | | | 3369 | | |
| SEQ ID | COMP ID | AACCCCGCGGGACAGCAG | 1216 | 1233 | 6491 | 6508 | SEQ ID | CTGCTGTCCCGCGGGGTT | 1.91 |
| 1742 | 1742 | | | | | | 3370 | | |
| SEQ ID | COMP ID | TAAACCCCGCGGGACAGC | 1218 | 1235 | 6493 | 6510 | SEQ ID | GCTGTCCCGCGGGGTTTA | 1.31 |
| 1743 | 1743 | | | | | | 3371 | | |
| SEQ ID | COMP ID | CGTAAACCCCGCGGGACA | 1220 | 1237 | 6495 | 6512 | SEQ ID | TGTCCCGCGGGGTTTACG | no data |
| 1744 | 1744 | | | | | | 3372 | | |
| SEQ ID | COMP ID | CACGTAAACCCCGCGGGA | 1222 | 1239 | 6497 | 6514 | SEQ ID | TCCCGCGGGGTTTACGTG | no data |
| 1745 | 1745 | | | | | | 3373 | | |
| SEQ ID | COMP ID | CACACGTAAACCCCGCGG | 1224 | 1241 | 6499 | 6516 | SEQ ID | CCGCGGGGTTTACGTGTG | no data |
| 1746 | 1746 | | | | | | 3374 | | |
| SEQ ID | COMP ID | GTCACACGTAAACCCCGC | 1226 | 1243 | 6501 | 6518 | SEQ ID | GCGGGGTTTACGTGTGAC | no data |
| 1747 | 1747 | | | | | | 3375 | | |
| SEQ ID | COMP ID | GTGTCACACGTAAACCCC | 1228 | 1245 | 6503 | 6520 | SEQ ID | GGGGTTTACGTGTGACAC | no data |
| 1748 | 1748 | | | | | | 3376 | | |
| SEQ ID | COMP ID | GCGTGTCACACGTAAACC | 1230 | 1247 | 6505 | 6522 | SEQ ID | GGTTTACGTGTGACACGC | no data |
| 1749 | 1749 | | | | | | 3377 | | |
| SEQ ID | COMP ID | CTGCGTGTCACACGTAAA | 1232 | 1249 | 6507 | 6524 | SEQ ID | TTTACGTGTGACACGCAG | no data |
| 1750 | 1750 | | | | | | 3378 | | |
| SEQ ID | COMP ID | TTCTGCGTGTCACACGTA | 1234 | 1251 | 6509 | 6526 | SEQ ID | TACGTGTGACACGCAGAA | no data |
| 1751 | 1751 | | | | | | 3379 | | |
| SEQ ID | COMP ID | CCTTCTGCGTGTCACACG | 1236 | 1253 | 6511 | 6528 | SEQ ID | CGTGTGACACGCAGAAGG | no data |
| 1752 | 1752 | | | | | | 3380 | | |
| SEQ ID | COMP ID | ACCCTTCTGCGTGTCACA | 1238 | 1255 | 6513 | 6530 | SEQ ID | TGTGACACGCAGAAGGGT | no data |
| 1753 | 1753 | | | | | | 3381 | | |
| SEQ ID | COMP ID | GTACCCTTCTGCGTGTCA | 1240 | 1257 | 6515 | 6532 | SEQ ID | TGACACGCAGAAGGGTAC | no data |
| 1754 | 1754 | | | | | | 3382 | | |
| SEQ ID | COMP ID | AGGTACCCTTCTGCGTGT | 1242 | 1259 | 6517 | 6534 | SEQ ID | ACACGCAGAAGGGTACCT | no data |
| 1755 | 1755 | | | | | | 3383 | | |
| SEQ ID | COMP ID | ACAGGTACCCTTCTGCGT | 1244 | 1261 | 6519 | 6536 | SEQ ID | ACGCAGAAGGGTACCTGT | no data |
| 1756 | 1756 | | | | | | 3384 | | |
| SEQ ID | COMP ID | TCACAGGTACCCTTCTGC | 1246 | 1263 | 6521 | 6538 | SEQ ID | GCAGAAGGGTACCTGTGA | no data |
| 1757 | 1757 | | | | | | 3385 | | |
| SEQ ID | COMP ID | GTTCACAGGTACCCTTCT | 1248 | 1265 | 6523 | 6540 | SEQ ID | AGAAGGGTACCTGTGAAC | no data |
| 1758 | 1758 | | | | | | 3386 | | |
| SEQ ID | COMP ID | CTGTTCACAGGTACCCTT | 1250 | 1267 | 6525 | 6542 | SEQ ID | AAGGGTACCTGTGAACAG | no data |
| 1759 | 1759 | | | | | | 3387 | | |
| SEQ ID | COMP ID | CCCTGTTCACAGGTACCC | 1252 | 1269 | 6527 | 6544 | SEQ ID | GGGTACCTGTGAACAGGG | no data |
| 1760 | 1760 | | | | | | 3388 | | |
| SEQ ID | COMP ID | GCCCCTGTTCACAGGTAC | 1254 | 1271 | 6529 | 6546 | SEQ ID | GTACCTGTGAACAGGGGC | no data |
| 1761 | 1761 | | | | | | 3389 | | |
| SEQ ID | COMP ID | GGGCCCCTGTTCACAGGT | 1256 | 1273 | 6531 | 6548 | SEQ ID | ACCTGTGAACAGGGGCCC | 1.64 |
| 1762 | 1762 | | | | | | 3390 | | |
| SEQ ID | COMP ID | TGGGGCCCCTGTTCACAG | 1258 | 1275 | 6533 | 6550 | SEQ ID | CTGTGAACAGGGGCCCCA | 1.48 |
| 1763 | 1763 | | | | | | 3391 | | |
| SEQ ID | COMP ID | GGTGGGGCCCCTGTTCAC | 1260 | 1277 | 6535 | 6552 | SEQ ID | GTGAACAGGGGCCCCACC | 1.51 |
| 1764 | 1764 | | | | | | 3392 | | |
| SEQ ID | COMP ID | CTGGTGGGGCCCCTGTTC | 1262 | 1279 | 6537 | 6554 | SEQ ID | GAACAGGGGCCCCACCAG | 1.9 |
| 1765 | 1765 | | | | | | 3393 | | |
| SEQ ID | COMP ID | ACCTGGTGGGGCCCCTGT | 1264 | 1281 | 6539 | 6556 | SEQ ID | ACAGGGGCCCCACCAGGT | 2.02 |
| 1766 | 1766 | | | | | | 3394 | | |
| SEQ ID | COMP ID | GCACCTGGTGGGGCCCCT | 1266 | 1283 | 6541 | 6558 | SEQ ID | AGGGGCCCCACCAGGTGC | 2.13 |
| 1767 | 1767 | | | | | | 3395 | | |
| SEQ ID | COMP ID | GGGCACCTGGTGGGGCCC | 1268 | 1285 | 6543 | 6560 | SEQ ID | GGGCCCCACCAGGTGCCC | 1.76 |
| 1768 | 1768 | | | | | | 3396 | | |
| SEQ ID | COMP ID | CAGGGCACCTGGTGGGGC | 1270 | 1287 | 6545 | 6562 | SEQ ID | GCCCCACCAGGTGCCCTG | 1.91 |
| 1769 | 1769 | | | | | | 3397 | | |
| SEQ ID | COMP ID | TCCAGGGCACCTGGTGGG | 1272 | 1289 | 6547 | 6564 | SEQ ID | CCCACCAGGTGCCCTGGA | 1.51 |
| 1770 | 1770 | | | | | | 3398 | | |
| SEQ ID | COMP ID | CATCCAGGGCACCTGGTG | 1274 | 1291 | 6549 | 6566 | SEQ ID | CACCAGGTGCCCTGGATG | 1.55 |
| 1771 | 1771 | | | | | | 3399 | | |
| SEQ ID | COMP ID | TCCATCCAGGGCACCTGG | 1276 | 1293 | 6551 | 6568 | SEQ ID | CCAGGTGCCCTGGATGGA | 1.34 |
| 1772 | 1772 | | | | | | 3400 | | |
| SEQ ID | COMP ID | TCTCCATCCAGGGCACCT | 1278 | 1295 | 6553 | 6570 | SEQ ID | AGGTGCCCTGGATGGAGA | 1.65 |
| 1773 | 1773 | | | | | | 3401 | | |
| SEQ ID | COMP ID | CTTCTCCATCCAGGGCAC | 1280 | 1297 | 6555 | 6572 | SEQ ID | GTGCCCTGGATGGAGAAG | 1.29 |
| 1774 | 1774 | | | | | | 3402 | | |
| SEQ ID | COMP ID | GCCTTCTCCATCCAGGGC | 1282 | 1299 | 6557 | 6574 | SEQ ID | GCCCTGGATGGAGAAGGC | 1.6 |
| 1775 | 1775 | | | | | | 3403 | | |
| SEQ ID | COMP ID | GGGCCTTCTCCATCCAGG | 1284 | 1301 | 6559 | 6576 | SEQ ID | CCTGGATGGAGAAGGCCC | 1.54 |
| 1776 | 1776 | | | | | | 3404 | | |
| SEQ ID | COMP ID | TGGGGCCTTCTCCATCCA | 1286 | 1303 | 6561 | 6578 | SEQ ID | TGGATGGAGAAGGCCCCA | 1.32 |
| 1777 | 1777 | | | | | | 3405 | | |
| SEQ ID | COMP ID | GCTGGGGCCTTCTCCATC | 1288 | 1305 | 6563 | 6580 | SEQ ID | GATGGAGAAGGCCCCAGC | 1.29 |
| 1778 | 1778 | | | | | | 3406 | | |
| SEQ ID | COMP ID | GAGCTGGGGCCTTCTCCA | 1290 | 1307 | 6565 | 6582 | SEQ ID | TGGAGAAGGCCCCAGCTC | 1.68 |
| 1779 | 1779 | | | | | | 3407 | | |
| SEQ ID | COMP ID | GTGAGCTGGGGCCTTCTC | 1292 | 1309 | 6567 | 6584 | SEQ ID | GAGAAGGCCCCAGCTCAC | 2.12 |
| 1780 | 1780 | | | | | | 3408 | | |
| SEQ ID | COMP ID | AGGTGAGCTGGGGCCTTC | 1294 | 1311 | 6569 | 6586 | SEQ ID | GAAGGCCCCAGCTCACCT | 2.3 |
| 1781 | 1781 | | | | | | 3409 | | |
| SEQ ID | COMP ID | TGAGGTGAGCTGGGGCCT | 1296 | 1313 | 6571 | 6588 | SEQ ID | AGGCCCCAGCTCACCTCA | 1.88 |
| 1782 | 1782 | | | | | | 3410 | | |
| SEQ ID | COMP ID | GCTGAGGTGAGCTGGGGC | 1298 | 1315 | 6573 | 6590 | SEQ ID | GCCCCAGCTCACCTCAGC | 2.3 |
| 1783 | 1783 | | | | | | 3411 | | |
| SEQ ID | COMP ID | AGGCTGAGGTGAGCTGGG | 1300 | 1317 | 6575 | 6592 | SEQ ID | CCCAGCTCACCTCAGCCT | 2.25 |
| 1784 | 1784 | | | | | | 3412 | | |
| SEQ ID | COMP ID | GCAGGCTGAGGTGAGCTG | 1302 | 1319 | 6577 | 6594 | SEQ ID | CAGCTCACCTCAGCCTGC | 1.51 |
| 1785 | 1785 | | | | | | 3413 | | |
| SEQ ID | COMP ID | TGGCAGGCTGAGGTGAGC | 1304 | 1321 | 6579 | 6596 | SEQ ID | GCTCACCTCAGCCTGCCA | 1.59 |
| 1786 | 1786 | | | | | | 3414 | | |
| SEQ ID | COMP ID | TCTGGCAGGCTGAGGTGA | 1306 | 1323 | 6581 | 6598 | SEQ ID | TCACCTCAGCCTGCCAGA | 1.82 |
| 1787 | 1787 | | | | | | 3415 | | |
| SEQ ID | COMP ID | GGTCTGGCAGGCTGAGGT | 1308 | 1325 | 6583 | 6600 | SEQ ID | ACCTCAGCCTGCCAGACC | 1.48 |
| 1788 | 1788 | | | | | | 3416 | | |
| SEQ ID | COMP ID | TGGGTCTGGCAGGCTGAG | 1310 | 1327 | 6585 | 6602 | SEQ ID | CTCAGCCTGCCAGACCCA | 1.69 |
| 1789 | 1789 | | | | | | 3417 | | |
| SEQ ID | COMP ID | TGTGGGTCTGGCAGGCTG | 1312 | 1329 | 6587 | 6604 | SEQ ID | CAGCCTGCCAGACCCACA | 1.49 |
| 1790 | 1790 | | | | | | 3418 | | |
| SEQ ID | COMP ID | CTTGTGGGTCTGGCAGGC | 1314 | 1331 | 6589 | 6606 | SEQ ID | GCCTGCCAGACCCACAAG | 1.6 |
| 1791 | 1791 | | | | | | 3419 | | |
| SEQ ID | COMP ID | GGCTTGTGGGTCTGGCAG | 1316 | 1333 | 6591 | 6608 | SEQ ID | CTGCCAGACCCACAAGCC | 1.76 |
| 1792 | 1792 | | | | | | 3420 | | |
| SEQ ID | COMP ID | AAGGCTTGTGGGTCTGGC | 1318 | 1335 | 6593 | 6610 | SEQ ID | GCCAGACCCACAAGCCTT | 1.3 |
| 1793 | 1793 | | | | | | 3421 | | |
| SEQ ID | COMP ID | TCAAGGCTTGTGGGTCTG | 1320 | 1337 | 6595 | 6612 | SEQ ID | CAGACCCACAAGCCTTGA | 1.81 |
| 1794 | 1794 | | | | | | 3422 | | |
| SEQ ID | COMP ID | CTTCAAGGCTTGTGGGTC | 1322 | 1339 | 6597 | 6614 | SEQ ID | GACCCACAAGCCTTGAAG | 1.75 |
| 1795 | 1795 | | | | | | 3423 | | |
| SEQ ID | COMP ID | CTCTTCAAGGCTTGTGGG | 1324 | 1341 | 6599 | 6616 | SEQ ID | CCCACAAGCCTTGAAGAG | 1.5 |
| 1796 | 1796 | | | | | | 3424 | | |
| SEQ ID | COMP ID | CTCTCTTCAAGGCTTGTG | 1326 | 1343 | 6601 | 6618 | SEQ ID | CACAAGCCTTGAAGAGAG | 1.4 |
| 1797 | 1797 | | | | | | 3425 | | |
| SEQ ID | COMP ID | ATCTCTCTTCAAGGCTTG | 1328 | 1345 | 6603 | 6620 | SEQ ID | CAAGCCTTGAAGAGAGAT | 1.39 |
| 1798 | 1798 | | | | | | 3426 | | |
| SEQ ID | COMP ID | ACATCTCTCTTCAAGGCT | 1330 | 1347 | 6605 | 6622 | SEQ ID | AGCCTTGAAGAGAGATGT | 1.15 |
| 1799 | 1799 | | | | | | 3427 | | |
| SEQ ID | COMP ID | GGACATCTCTCTTCAAGG | 1332 | 1349 | 6607 | 6624 | SEQ ID | CCTTGAAGAGAGATGTCC | 1.66 |
| 1800 | 1800 | | | | | | 3428 | | |
| SEQ ID | COMP ID | GGGGACATCTCTCTTCAA | 1334 | 1351 | 6609 | 6626 | SEQ ID | TTGAAGAGAGATGTCCCC | 1.66 |
| 1801 | 1801 | | | | | | 3429 | | |
| SEQ ID | COMP ID | CAGGGGACATCTCTCTTC | 1336 | 1353 | 6611 | 6628 | SEQ ID | GAAGAGAGATGTCCCCTG | 1.76 |
| 1802 | 1802 | | | | | | 3430 | | |
| SEQ ID | COMP ID | CACAGGGGACATCTCTCT | 1338 | 1355 | 6613 | 6630 | SEQ ID | AGAGAGATGTCCCCTGTG | 1.48 |
| 1803 | 1803 | | | | | | 3431 | | |
| SEQ ID | COMP ID | ATCACAGGGGACATCTCT | 1340 | 1357 | 6615 | 6632 | SEQ ID | AGAGATGTCCCCTGTGAT | 2.37 |
| 1804 | 1804 | | | | | | 3432 | | |
| SEQ ID | COMP ID | TTATCACAGGGGACATCT | 1342 | 1359 | 6617 | 6634 | SEQ ID | AGATGTCCCCTGTGATAA | 2.41 |
| 1805 | 1805 | | | | | | 3433 | | |
| SEQ ID | COMP ID | CATTATCACAGGGGACAT | 1344 | 1361 | 6619 | 6636 | SEQ ID | ATGTCCCCTGTGATAATG | 1.94 |
| 1806 | 1806 | | | | | | 3434 | | |
| SEQ ID | COMP ID | GACATTATCACAGGGGAC | 1346 | 1363 | 6621 | 6638 | SEQ ID | GTCCCCTGTGATAATGTC | 2.18 |
| 1807 | 1807 | | | | | | 3435 | | |
| SEQ ID | COMP ID | CTGACATTATCACAGGGG | 1348 | 1365 | 6623 | 6640 | SEQ ID | CCCCTGTGATAATGTCAG | 2.28 |
| 1808 | 1808 | | | | | | 3436 | | |
| SEQ ID | COMP ID | TGCTGACATTATCACAGG | 1350 | 1367 | 6625 | 6642 | SEQ ID | CCTGTGATAATGTCAGCA | 1.89 |
| 1809 | 1809 | | | | | | 3437 | | |
| SEQ ID | COMP ID | GCTGCTGACATTATCACA | 1352 | 1369 | 6627 | 6644 | SEQ ID | TGTGATAATGTCAGCAGC | 1.14 |
| 1810 | 1810 | | | | | | 3438 | | |
| SEQ ID | COMP ID | CAGCTGCTGACATTATCA | 1354 | 1371 | 6629 | 6646 | SEQ ID | TGATAATGTCAGCAGCTG | 1.63 |
| 1811 | 1811 | | | | | | 3439 | | |
| SEQ ID | COMP ID | GACAGCTGCTGACATTAT | 1356 | 1373 | 6631 | 6648 | SEQ ID | ATAATGTCAGCAGCTGTC | 1.59 |
| 1812 | 1812 | | | | | | 3440 | | |
| SEQ ID | COMP ID | GGGACAGCTGCTGACATT | 1358 | 1375 | 6633 | 6650 | SEQ ID | AATGTCAGCAGCTGTCCC | 2.5 |
| 1813 | 1813 | | | | | | 3441 | | |
| SEQ ID | COMP ID | GAGGGACAGCTGCTGACA | 1360 | 1377 | 6635 | 6652 | SEQ ID | TGTCAGCAGCTGTCCCTC | 2.06 |
| 1814 | 1814 | | | | | | 3442 | | |
| SEQ ID | COMP ID | AGGAGGGACAGCTGCTGA | 1362 | 1379 | 6637 | 6654 | SEQ ID | TCAGCAGCTGTCCCTCCT | 2.87 |
| 1815 | 1815 | | | | | | 3443 | | |
| SEQ ID | COMP ID | GGAGGAGGGACAGCTGCT | 1364 | 1381 | 6639 | 6656 | SEQ ID | AGCAGCTGTCCCTCCTCC | 1.89 |
| 1816 | 1816 | | | | | | 3444 | | |
| SEQ ID | COMP ID | TCGGAGGAGGGACAGCTG | 1366 | 1383 | 6641 | 6658 | SEQ ID | CAGCTGTCCCTCCTCCGA | 1.93 |
| 1817 | 1817 | | | | | | 3445 | | |
| SEQ ID | COMP ID | TATCGGAGGAGGGACAGC | 1368 | 1385 | 6643 | 6660 | SEQ ID | GCTGTCCCTCCTCCGATA | 2.12 |
| 1818 | 1818 | | | | | | 3446 | | |
| SEQ ID | COMP ID | GGTATCGGAGGAGGGACA | 1370 | 1387 | 6645 | 6662 | SEQ ID | TGTCCCTCCTCCGATACC | 2.22 |
| 1819 | 1819 | | | | | | 3447 | | |
| SEQ ID | COMP ID | CAGGTATCGGAGGAGGGA | 1372 | 1389 | 6647 | 6664 | SEQ ID | TCCCTCCTCCGATACCTG | 2.55 |
| 1820 | 1820 | | | | | | 3448 | | |
| SEQ ID | COMP ID | AGCAGGTATCGGAGGAGG | 1374 | 1391 | 6649 | 6666 | SEQ ID | CCTCCTCCGATACCTGCT | 2.39 |
| 1821 | 1821 | | | | | | 3449 | | |
| SEQ ID | COMP ID | GCAGCAGGTATCGGAGGA | 1376 | 1393 | 6651 | 6668 | SEQ ID | TCCTCCGATACCTGCTGC | 2.06 |
| 1822 | 1822 | | | | | | 3450 | | |
| SEQ ID | COMP ID | TGGCAGCAGGTATCGGAG | 1378 | 1395 | 6653 | 6670 | SEQ ID | CTCCGATACCTGCTGCCA | 1.88 |
| 1823 | 1823 | | | | | | 3451 | | |
| SEQ ID | COMP ID | GTTGGCAGCAGGTATCGG | 1380 | 1397 | 6655 | 6672 | SEQ ID | CCGATACCTGCTGCCAAC | 1.92 |
| 1824 | 1824 | | | | | | 3452 | | |
| SEQ ID | COMP ID | GAGTTGGCAGCAGGTATC | 1382 | 1399 | 6657 | 6674 | SEQ ID | GATACCTGCTGCCAACTC | 1.48 |
| 1825 | 1825 | | | | | | 3453 | | |
| SEQ ID | COMP ID | GTGAGTTGGCAGCAGGTA | 1384 | 1401 | 6659 | 6676 | SEQ ID | TACCTGCTGCCAACTCAC | 1.14 |
| 1826 | 1826 | | | | | | 3454 | | |
| SEQ ID | COMP ID | ACGTGAGTTGGCAGCAGG | 1386 | 1403 | 6661 | 6678 | SEQ ID | CCTGCTGCCAACTCACGT | no data |
| 1827 | 1827 | | | | | | 3455 | | |
| SEQ ID | COMP ID | AGACGTGAGTTGGCAGCA | 1388 | 1405 | 6663 | 6680 | SEQ ID | TGCTGCCAACTCACGTCT | no data |
| 1828 | 1828 | | | | | | 3456 | | |
| SEQ ID | COMP ID | CCAGACGTGAGTTGGCAG | 1390 | 1407 | 6665 | 6682 | SEQ ID | CTGCCAACTCACGTCTGG | no data |
| 1829 | 1829 | | | | | | 3457 | | |
| SEQ ID | COMP ID | CCCCAGACGTGAGTTGGC | 1392 | 1409 | 6667 | 6684 | SEQ ID | GCCAACTCACGTCTGGGG | no data |
| 1830 | 1830 | | | | | | 3458 | | |
| SEQ ID | COMP ID | CTCCCCAGACGTGAGTTG | 1394 | 1411 | 6669 | 6686 | SEQ ID | CAACTCACGTCTGGGGAG | no data |
| 1831 | 1831 | | | | | | 3459 | | |
| SEQ ID | COMP ID | CACTCCCCAGACGTGAGT | 1396 | 1413 | 6671 | 6688 | SEQ ID | ACTCACGTCTGGGGAGTG | 1.67 |
| 1832 | 1832 | | | | | | 3460 | | |
| SEQ ID | COMP ID | CCCACTCCCCAGACGTGA | 1398 | 1415 | 6673 | 6690 | SEQ ID | TCACGTCTGGGGAGTGGG | 1.7 |
| 1833 | 1833 | | | | | | 3461 | | |
| SEQ ID | COMP ID | GCCCCACTCCCCAGACGT | 1400 | 1417 | 6675 | 6692 | SEQ ID | ACGTCTGGGGAGTGGGGC | no data |
| 1834 | 1834 | | | | | | 3462 | | |
| SEQ ID | COMP ID | CAGCCCCACTCCCCAGAC | 1402 | 1419 | 6677 | 6694 | SEQ ID | GTCTGGGGAGTGGGGCTG | no data |
| 1835 | 1835 | | | | | | 3463 | | |
| SEQ ID | COMP ID | AGCAGCCCCACTCCCCAG | 1404 | 1421 | 6679 | 6696 | SEQ ID | CTGGGGAGTGGGGCTGCT | 1.34 |
| 1836 | 1836 | | | | | | 3464 | | |
| SEQ ID | COMP ID | ACAGCAGCCCCACTCCCC | 1406 | 1423 | 6681 | 6698 | SEQ ID | GGGGAGTGGGGCTGCTGT | 1.38 |
| 1837 | 1837 | | | | | | 3465 | | |
| SEQ ID | COMP ID | GGACAGCAGCCCCACTCC | 1408 | 1425 | 6683 | 6700 | SEQ ID | GGAGTGGGGCTGCTGTCC | 1.63 |
| 1838 | 1838 | | | | | | 3466 | | |
| SEQ ID | COMP ID | TTGGACAGCAGCCCCACT | 1410 | 1427 | 6685 | 6702 | SEQ ID | AGTGGGGCTGCTGTCCAA | 1.72 |
| 1839 | 1839 | | | | | | 3467 | | |
| SEQ ID | COMP ID | GATTGGACAGCAGCCCCA | 1412 | 1429 | 6687 | 6704 | SEQ ID | TGGGGCTGCTGTCCAATC | 1.58 |
| 1840 | 1840 | | | | | | 3468 | | |
| SEQ ID | COMP ID | GGGATTGGACAGCAGCCC | 1414 | 1431 | 6689 | 6706 | SEQ ID | GGGCTGCTGTCCAATCCC | no data |
| 1841 | 1841 | | | | | | 3469 | | |
| SEQ ID | COMP ID | CTGGGATTGGACAGCAGC | 1416 | 1433 | 6691 | 6708 | SEQ ID | GCTGCTGTCCAATCCCAG | no data |
| 1842 | 1842 | | | | | | 3470 | | |
| SEQ ID | COMP ID | CTCTGGGATTGGACAGCA | 1418 | 1435 | 6693 | 6710 | SEQ ID | TGCTGTCCAATCCCAGAG | no data |
| 1843 | 1843 | | | | | | 3471 | | |
| SEQ ID | COMP ID | GCTGTCCCCTCCCATATA | | | 6712 | 6729 | SEQ ID | TATATGGGAGGGGACAGC | no data |
| 1844 | 1844 | | | | | | 3472 | | |
| SEQ ID | COMP ID | ATGCTGTCCCCTCCCATA | | | 6714 | 6731 | SEQ ID | TATGGGAGGGGACAGCAT | no data |
| 1845 | 1845 | | | | | | 3473 | | |
| SEQ ID | COMP ID | AGATGCTGTCCCCTCCCA | | | 6716 | 6733 | SEQ ID | TGGGAGGGGACAGCATCT | no data |
| 1846 | 1846 | | | | | | 3474 | | |
| SEQ ID | COMP ID | CAAGATGCTGTCCCCTCC | | | 6718 | 6735 | SEQ ID | GGAGGGGACAGCATCTTG | no data |
| 1847 | 1847 | | | | | | 3475 | | |
| SEQ ID | COMP ID | GCCAAGATGCTGTCCCCT | | | 6720 | 6737 | SEQ ID | AGGGGACAGCATCTTGGC | no data |
| 1848 | 1848 | | | | | | 3476 | | |
| SEQ ID | COMP ID | AGGCCAAGATGCTGTCCC | | | 6722 | 6739 | SEQ ID | GGGACAGCATCTTGGCCT | no data |
| 1849 | 1849 | | | | | | 3477 | | |
| SEQ ID | COMP ID | CCAGGCCAAGATGCTGTC | | | 6724 | 6741 | SEQ ID | GACAGCATCTTGGCCTGG | no data |
| 1850 | 1850 | | | | | | 3478 | | |
| SEQ ID | COMP ID | GCCCAGGCCAAGATGCTG | | | 6726 | 6743 | SEQ ID | CAGCATCTTGGCCTGGGC | no data |
| 1851 | 1851 | | | | | | 3479 | | |
| SEQ ID | COMP ID | CTGCCCAGGCCAAGATGC | | | 6728 | 6745 | SEQ ID | GCATCTTGGCCTGGGCAG | no data |
| 1852 | 1852 | | | | | | 3480 | | |
| SEQ ID | COMP ID | ACCTGCCCAGGCCAAGAT | | | 6730 | 6747 | SEQ ID | ATCTTGGCCTGGGCAGGT | no data |
| 1853 | 1853 | | | | | | 3481 | | |
| SEQ ID | COMP ID | CCACCTGCCCAGGCCAAG | | | 6732 | 6749 | SEQ ID | CTTGGCCTGGGCAGGTGG | no data |
| 1854 | 1854 | | | | | | 3482 | | |
| SEQ ID | COMP ID | ACCCACCTGCCCAGGCCA | | | 6734 | 6751 | SEQ ID | TGGCCTGGGCAGGTGGGT | no data |
| 1855 | 1855 | | | | | | 3483 | | |
| SEQ ID | COMP ID | CCACCCACCTGCCCAGGC | | | 6736 | 6753 | SEQ ID | GCCTGGGCAGGTGGGTGG | no data |
| 1856 | 1856 | | | | | | 3484 | | |
| SEQ ID | COMP ID | GGCCACCCACCTGCCCAG | | | 6738 | 6755 | SEQ ID | CTGGGCAGGTGGGTGGCC | no data |
| 1857 | 1857 | | | | | | 3485 | | |
| SEQ ID | COMP ID | TTGGCCACCCACCTGCCC | | | 6740 | 6757 | SEQ ID | GGGCAGGTGGGTGGCCAA | 1.32 |
| 1858 | 1858 | | | | | | 3486 | | |
| SEQ ID | COMP ID | GCTTGGCCACCCACCTGC | | | 6742 | 6759 | SEQ ID | GCAGGTGGGTGGCCAAGC | 1.18 |
| 1859 | 1859 | | | | | | 3487 | | |
| SEQ ID | COMP ID | GAGCTTGGCCACCCACCT | | | 6744 | 6761 | SEQ ID | AGGTGGGTGGCCAAGCTC | 1.25 |
| 1860 | 1860 | | | | | | 3488 | | |
| SEQ ID | COMP ID | AGCCACTATGTGGGGCGC | | | 6880 | 6897 | SEQ ID | GCGCCCCACATAGTGGCT | 1.14 |
| 1861 | 1861 | | | | | | 3489 | | |
| SEQ ID | COMP ID | GTAGCCACTATGTGGGGC | | | 6882 | 6899 | SEQ ID | GCCCCACATAGTGGCTAC | 2.07 |
| 1862 | 1862 | | | | | | 3490 | | |
| SEQ ID | COMP ID | AGGTAGCCACTATGTGGG | | | 6884 | 6901 | SEQ ID | CCCACATAGTGGCTACCT | 1.38 |
| 1863 | 1863 | | | | | | 3491 | | |
| SEQ ID | COMP ID | GTAGGTAGCCACTATGTG | | | 6886 | 6903 | SEQ ID | CACATAGTGGCTACCTAC | no data |
| 1864 | 1864 | | | | | | 3492 | | |
| SEQ ID | COMP ID | TTGTAGGTAGCCACTATG | | | 6888 | 6905 | SEQ ID | CATAGTGGCTACCTACAA | 1.38 |
| 1865 | 1865 | | | | | | 3493 | | |
| SEQ ID | COMP ID | CGTTGTAGGTAGCCACTA | | | 6890 | 6907 | SEQ ID | TAGTGGCTACCTACAACG | 1.72 |
| 1866 | 1866 | | | | | | 3494 | | |
| SEQ ID | COMP ID | GGCGTTGTAGGTAGCCAC | | | 6892 | 6909 | SEQ ID | GTGGCTACCTACAACGCC | no data |
| 1867 | 1867 | | | | | | 3495 | | |
| SEQ ID | COMP ID | AGGGCGTTGTAGGTAGCC | | | 6894 | 6911 | SEQ ID | GGCTACCTACAACGCCCT | 1.79 |
| 1868 | 1868 | | | | | | 3496 | | |
| SEQ ID | COMP ID | AAAGGGCGTTGTAGGTAG | | | 6896 | 6913 | SEQ ID | CTACCTACAACGCCCTTT | 1.45 |
| 1869 | 1869 | | | | | | 3497 | | |
| SEQ ID | COMP ID | GGAAAGGGCGTTGTAGGT | | | 6898 | 6915 | SEQ ID | ACCTACAACGCCCTTTCC | no data |
| 1870 | 1870 | | | | | | 3498 | | |
| SEQ ID | COMP ID | CAGGAAAGGGCGTTGTAG | | | 6900 | 6917 | SEQ ID | CTACAACGCCCTTTCCTG | no data |
| 1871 | 1871 | | | | | | 3499 | | |
| SEQ ID | COMP ID | GGCAGGAAAGGGCGTTGT | | | 6902 | 6919 | SEQ ID | ACAACGCCCTTTCCTGCC | no data |
| 1872 | 1872 | | | | | | 3500 | | |
| SEQ ID | COMP ID | TGGGCAGGAAAGGGCGTT | | | 6904 | 6921 | SEQ ID | AACGCCCTTTCCTGCCCA | 1.9 |
| 1873 | 1873 | | | | | | 3501 | | |
| SEQ ID | COMP ID | GGTGGGCAGGAAAGGGCG | | | 6906 | 6923 | SEQ ID | CGCCCTTTCCTGCCCACC | no data |
| 1874 | 1874 | | | | | | 3502 | | |
| SEQ ID | COMP ID | GGGGTGGGCAGGAAAGGG | | | 6908 | 6925 | SEQ ID | CCCTTTCCTGCCCACCCC | no data |
| 1875 | 1875 | | | | | | 3503 | | |
| SEQ ID | COMP ID | GGGGGGTGGGCAGGAAAG | | | 6910 | 6927 | SEQ ID | CTTTCCTGCCCACCCCCC | no data |
| 1876 | 1876 | | | | | | 3504 | | |
| SEQ ID | COMP ID | CTGGGGGGTGGGCAGGAA | | | 6912 | 6929 | SEQ ID | TTCCTGCCCACCCCCCAG | 2.53 |
| 1877 | 1877 | | | | | | 3505 | | |
| SEQ ID | COMP ID | GGTCCGAGCAGCAGACAG | 1437 | 1454 | 6931 | 6948 | SEQ ID | CTGTCTGCTGCTCGGACC | no data |
| 1878 | 1878 | | | | | | 3506 | | |
| SEQ ID | COMP ID | GTGGTCCGAGCAGCAGAC | 1439 | 1456 | 6933 | 6950 | SEQ ID | GTCTGCTGCTCGGACCAC | no data |
| 1879 | 1879 | | | | | | 3507 | | |
| SEQ ID | COMP ID | TGGTGGTCCGAGCAGCAG | 1441 | 1458 | 6935 | 6952 | SEQ ID | CTGCTGCTCGGACCACCA | 1.21 |
| 1880 | 1880 | | | | | | 3508 | | |
| SEQ ID | COMP ID | GCTGGTGGTCCGAGCAGC | 1443 | 1460 | 6937 | 6954 | SEQ ID | GCTGCTCGGACCACCAGC | no data |
| 1881 | 1881 | | | | | | 3509 | | |
| SEQ ID | COMP ID | GTGCTGGTGGTCCGAGCA | 1445 | 1462 | 6939 | 6956 | SEQ ID | TGCTCGGACCACCAGCAC | no data |
| 1882 | 1882 | | | | | | 3510 | | |
| SEQ ID | COMP ID | CAGTGCTGGTGGTCCGAG | 1447 | 1464 | 6941 | 6958 | SEQ ID | CTCGGACCACCAGCACTG | 1.79 |
| 1883 | 1883 | | | | | | 3511 | | |
| SEQ ID | COMP ID | AGCAGTGCTGGTGGTCCG | 1449 | 1466 | 6943 | 6960 | SEQ ID | CGGACCACCAGCACTGCT | 1.64 |
| 1884 | 1884 | | | | | | 3512 | | |
| SEQ ID | COMP ID | GCAGCAGTGCTGGTGGTC | 1451 | 1468 | 6945 | 6962 | SEQ ID | GACCACCAGCACTGCTGC | no data |
| 1885 | 1885 | | | | | | 3513 | | |
| SEQ ID | COMP ID | GGGCAGCAGTGCTGGTGG | 1453 | 1470 | 6947 | 6964 | SEQ ID | CCACCAGCACTGCTGCCC | no data |
| 1886 | 1886 | | | | | | 3514 | | |
| SEQ ID | COMP ID | GGGGGCAGCAGTGCTGGT | 1455 | 1472 | 6949 | 6966 | SEQ ID | ACCAGCACTGCTGCCCCC | no data |
| 1887 | 1887 | | | | | | 3515 | | |
| SEQ ID | COMP ID | CTGGGGGCAGCAGTGCTG | 1457 | 1474 | 6951 | 6968 | SEQ ID | CAGCACTGCTGCCCCCAG | 2.15 |
| 1888 | 1888 | | | | | | 3516 | | |
| SEQ ID | COMP ID | CCCTGGGGGCAGCAGTGC | 1459 | 1476 | 6953 | 6970 | SEQ ID | GCACTGCTGCCCCCAGGG | 1.71 |
| 1889 | 1889 | | | | | | 3517 | | |
| SEQ ID | COMP ID | AGCCCTGGGGGCAGCAGT | 1461 | 1478 | 6955 | 6972 | SEQ ID | ACTGCTGCCCCCAGGGCT | 1.36 |
| 1890 | 1890 | | | | | | 3518 | | |
| SEQ ID | COMP ID | GTAGCCCTGGGGGCAGCA | 1463 | 1480 | 6957 | 6974 | SEQ ID | TGCTGCCCCCAGGGCTAC | no data |
| 1891 | 1891 | | | | | | 3519 | | |
| SEQ ID | COMP ID | GTGTAGCCCTGGGGGCAG | 1465 | 1482 | 6959 | 6976 | SEQ ID | CTGCCCCCAGGGCTACAC | no data |
| 1892 | 1892 | | | | | | 3520 | | |
| SEQ ID | COMP ID | ACGTGTAGCCCTGGGGGC | 1467 | 1484 | 6961 | 6978 | SEQ ID | GCCCCCAGGGCTACACGT | 2.09 |
| 1893 | 1893 | | | | | | 3521 | | |
| SEQ ID | COMP ID | ACACGTGTAGCCCTGGGG | 1469 | 1486 | 6963 | 6980 | SEQ ID | CCCCAGGGCTACACGTGT | 1.58 |
| 1894 | 1894 | | | | | | 3522 | | |
| SEQ ID | COMP ID | ACACACGTGTAGCCCTGG | 1471 | 1488 | 6965 | 6982 | SEQ ID | CCAGGGCTACACGTGTGT | 1.42 |
| 1895 | 1895 | | | | | | 3523 | | |
| SEQ ID | COMP ID | CTACACACGTGTAGCCCT | 1473 | 1490 | 6967 | 6984 | SEQ ID | AGGGCTACACGTGTGTAG | 1.39 |
| 1896 | 1896 | | | | | | 3524 | | |
| SEQ ID | COMP ID | AGCTACACACGTGTAGCC | 1475 | 1492 | 6969 | 6986 | SEQ ID | GGCTACACGTGTGTAGCT | 1.23 |
| 1897 | 1897 | | | | | | 3525 | | |
| SEQ ID | COMP ID | TCAGCTACACACGTGTAG | 1477 | 1494 | 6971 | 6988 | SEQ ID | CTACACGTGTGTAGCTGA | 1.21 |
| 1898 | 1898 | | | | | | 3526 | | |
| SEQ ID | COMP ID | CCTCAGCTACACACGTGT | 1479 | 1496 | 6973 | 6990 | SEQ ID | ACACGTGTGTAGCTGAGG | 1.41 |
| 1899 | 1899 | | | | | | 3527 | | |
| SEQ ID | COMP ID | CCCCTCAGCTACACACGT | 1481 | 1498 | 6975 | 6992 | SEQ ID | ACGTGTGTAGCTGAGGGG | 1.17 |
| 1900 | 1900 | | | | | | 3528 | | |
| SEQ ID | COMP ID | TGCCCCTCAGCTACACAC | 1483 | 1500 | 6977 | 6994 | SEQ ID | GTGTGTAGCTGAGGGGCA | 0.85 |
| 1901 | 1901 | | | | | | 3529 | | |
| SEQ ID | COMP ID | ACTGCCCCTCAGCTACAC | 1485 | 1502 | 6979 | 6996 | SEQ ID | GTGTAGCTGAGGGGCAGT | 1.3 |
| 1902 | 1902 | | | | | | 3530 | | |
| SEQ ID | COMP ID | ACACTGCCCCTCAGCTAC | 1487 | 1504 | 6981 | 6998 | SEQ ID | GTAGCTGAGGGGCAGTGT | 1.13 |
| 1903 | 1903 | | | | | | 3531 | | |
| SEQ ID | COMP ID | TGACACTGCCCCTCAGCT | 1489 | 1506 | 6983 | 7000 | SEQ ID | AGCTGAGGGGCAGTGTCA | 1.25 |
| 1904 | 1904 | | | | | | 3532 | | |
| SEQ ID | COMP ID | GCTGACACTGCCCCTCAG | 1491 | 1508 | 6985 | 7002 | SEQ ID | CTGAGGGGCAGTGTCAGC | no data |
| 1905 | 1905 | | | | | | 3533 | | |
| SEQ ID | COMP ID | TCGCTGACACTGCCCCTC | 1493 | 1510 | 6987 | 7004 | SEQ ID | GAGGGGCAGTGTCAGCGA | 1.09 |
| 1906 | 1906 | | | | | | 3534 | | |
| SEQ ID | COMP ID | CCTCGCTGACACTGCCCC | 1495 | 1512 | 6989 | 7006 | SEQ ID | GGGGCAGTGTCAGCGAGG | 1.18 |
| 1907 | 1907 | | | | | | 3535 | | |
| SEQ ID | COMP ID | TTCCTCGCTGACACTGCC | 1497 | 1514 | 6991 | 7008 | SEQ ID | GGCAGTGTCAGCGAGGAA | 1.2 |
| 1908 | 1908 | | | | | | 3536 | | |
| SEQ ID | COMP ID | GCTTCCTCGCTGACACTG | 1499 | 1516 | 6993 | 7010 | SEQ ID | CAGTGTCAGCGAGGAAGC | no data |
| 1909 | 1909 | | | | | | 3537 | | |
| SEQ ID | COMP ID | TCGCTTCCTCGCTGACAC | 1501 | 1518 | 6995 | 7012 | SEQ ID | GTGTCAGCGAGGAAGCGA | 1.41 |
| 1910 | 1910 | | | | | | 3538 | | |
| SEQ ID | COMP ID | TCTCGCTTCCTCGCTGAC | 1503 | 1520 | 6997 | 7014 | SEQ ID | GTCAGCGAGGAAGCGAGA | 1.26 |
| 1911 | 1911 | | | | | | 3539 | | |
| SEQ ID | COMP ID | GATCTCGCTTCCTCGCTG | 1505 | 1522 | 6999 | 7016 | SEQ ID | CAGCGAGGAAGCGAGATC | no data |
| 1912 | 1912 | | | | | | 3540 | | |
| SEQ ID | COMP ID | ACGATCTCGCTTCCTCGC | 1507 | 1524 | 7001 | 7018 | SEQ ID | GCGAGGAAGCGAGATCGT | 1.25 |
| 1913 | 1913 | | | | | | 3541 | | |
| SEQ ID | COMP ID | CCACGATCTCGCTTCCTC | 1509 | 1526 | 7003 | 7020 | SEQ ID | GAGGAAGCGAGATCGTGG | 1.25 |
| 1914 | 1914 | | | | | | 3542 | | |
| SEQ ID | COMP ID | AGCCACGATCTCGCTTCC | 1511 | 1528 | 7005 | 7022 | SEQ ID | GGAAGCGAGATCGTGGCT | 1.31 |
| 1915 | 1915 | | | | | | 3543 | | |
| SEQ ID | COMP ID | CCAGCCACGATCTCGCTT | 1513 | 1530 | 7007 | 7024 | SEQ ID | AAGCGAGATCGTGGCTGG | 1.4 |
| 1916 | 1916 | | | | | | 3544 | | |
| SEQ ID | COMP ID | GTCCAGCCACGATCTCGC | 1515 | 1532 | 7009 | 7026 | SEQ ID | GCGAGATCGTGGCTGGAC | no data |
| 1917 | 1917 | | | | | | 3545 | | |
| SEQ ID | COMP ID | CAGTCCAGCCACGATCTC | 1517 | 1534 | 7011 | 7028 | SEQ ID | GAGATCGTGGCTGGACTG | 1.26 |
| 1918 | 1918 | | | | | | 3546 | | |
| SEQ ID | COMP ID | TCCAGTCCAGCCACGATC | 1519 | 1536 | 7013 | 7030 | SEQ ID | GATCGTGGCTGGACTGGA | 0.95 |
| 1919 | 1919 | | | | | | 3547 | | |
| SEQ ID | COMP ID | TCTCCAGTCCAGCCACGA | 1521 | 1538 | 7015 | 7032 | SEQ ID | TCGTGGCTGGACTGGAGA | 1.1 |
| 1920 | 1920 | | | | | | 3548 | | |
| SEQ ID | COMP ID | CTTCTCCAGTCCAGCCAC | 1523 | 1540 | 7017 | 7034 | SEQ ID | GTGGCTGGACTGGAGAAG | 1.3 |
| 1921 | 1921 | | | | | | 3549 | | |
| SEQ ID | COMP ID | ATCTTCTCCAGTCCAGCC | 1525 | 1542 | 7019 | 7036 | SEQ ID | GGCTGGACTGGAGAAGAT | 1.14 |
| 1922 | 1922 | | | | | | 3550 | | |
| SEQ ID | COMP ID | GCATCTTCTCCAGTCCAG | 1527 | 1544 | 7021 | 7038 | SEQ ID | CTGGACTGGAGAAGATGC | no data |
| 1923 | 1923 | | | | | | 3551 | | |
| SEQ ID | COMP ID | AGGCATCTTCTCCAGTCC | 1529 | 1546 | 7023 | 7040 | SEQ ID | GGACTGGAGAAGATGCCT | 1.34 |
| 1924 | 1924 | | | | | | 3552 | | |
| SEQ ID | COMP ID | GCAGGCATCTTCTCCAGT | 1531 | 1548 | 7025 | 7042 | SEQ ID | ACTGGAGAAGATGCCTGC | no data |
| 1925 | 1925 | | | | | | 3553 | | |
| SEQ ID | COMP ID | GGGCAGGCATCTTCTCCA | 1533 | 1550 | 7027 | 7044 | SEQ ID | TGGAGAAGATGCCTGCCC | no data |
| 1926 | 1926 | | | | | | 3554 | | |
| SEQ ID | COMP ID | GCGGGCAGGCATCTTCTC | 1535 | 1552 | 7029 | 7046 | SEQ ID | GAGAAGATGCCTGCCCGC | no data |
| 1927 | 1927 | | | | | | 3555 | | |
| SEQ ID | COMP ID | CGGCGGGCAGGCATCTTC | 1537 | 1554 | 7031 | 7048 | SEQ ID | GAAGATGCCTGCCCGCCG | 1.75 |
| 1928 | 1928 | | | | | | 3556 | | |
| SEQ ID | COMP ID | CCCGGCGGGCAGGCATCT | 1539 | 1556 | 7033 | 7050 | SEQ ID | AGATGCCTGCCCGCCGGG | 1.51 |
| 1929 | 1929 | | | | | | 3557 | | |
| SEQ ID | COMP ID | AGCCCGGGGGGCAGGCAT | 1541 | 1558 | 7035 | 7052 | SEQ ID | ATGCCTGCCCGCCGGGCT | 1.34 |
| 1930 | 1930 | | | | | | 3558 | | |
| SEQ ID | COMP ID | GAAGCCCGGCGGGCAGGC | 1543 | 1560 | 7037 | 7054 | SEQ ID | GCCTGCCCGCCGGGCTTC | no data |
| 1931 | 1931 | | | | | | 3559 | | |
| SEQ ID | COMP ID | AGGAAGCCCGGCGGGCAG | 1545 | 1562 | 7039 | 7056 | SEQ ID | CTGCCCGCCGGGCTTCCT | 1.48 |
| 1932 | 1932 | | | | | | 3560 | | |
| SEQ ID | COMP ID | TAAGGAAGCCCGGGGGGC | 1547 | 1564 | 7041 | 7058 | SEQ ID | GCCCGCCGGGCTTCCTTA | 1.54 |
| 1933 | 1933 | | | | | | 3561 | | |
| SEQ ID | COMP ID | GATAAGGAAGCCCGGCGG | 1549 | 1566 | 7043 | 7060 | SEQ ID | CCGCCGGGCTTCCTTATC | no data |
| 1934 | 1934 | | | | | | 3562 | | |
| SEQ ID | COMP ID | GGGATAAGGAAGCCCGGC | 1551 | 1568 | 7045 | 7062 | SEQ ID | GCCGGGCTTCCTTATCCC | no data |
| 1935 | 1935 | | | | | | 3563 | | |
| SEQ ID | COMP ID | GTGGGATAAGGAAGCCCG | 1553 | 1570 | 7047 | 7064 | SEQ ID | CGGGCTTCCTTATCCCAC | no data |
| 1936 | 1936 | | | | | | 3564 | | |
| SEQ ID | COMP ID | GGGTGGGATAAGGAAGCC | 1555 | 1572 | 7049 | 7066 | SEQ ID | GGCTTCCTTATCCCACCC | no data |
| 1937 | 1937 | | | | | | 3565 | | |
| SEQ ID | COMP ID | TGGGGTGGGATAAGGAAG | 1557 | 1574 | 7051 | 7068 | SEQ ID | CTTCCTTATCCCACCCCA | 2.09 |
| 1938 | 1938 | | | | | | 3566 | | |
| SEQ ID | COMP ID | TCTGGGGTGGGATAAGGA | 1559 | 1576 | 7053 | 7070 | SEQ ID | TCCTTATCCCACCCCAGA | 2.2 |
| 1939 | 1939 | | | | | | 3567 | | |
| SEQ ID | COMP ID | TCTCTGGGGTGGGATAAG | 1561 | 1578 | 7055 | 7072 | SEQ ID | CTTATCCCACCCCAGAGA | 2.51 |
| 1940 | 1940 | | | | | | 3568 | | |
| SEQ ID | COMP ID | TGTCTCTGGGGTGGGATA | 1563 | 1580 | 7057 | 7074 | SEQ ID | TATCCCACCCCAGAGACA | 2.49 |
| 1941 | 1941 | | | | | | 3569 | | |
| SEQ ID | COMP ID | GATGTCTCTGGGGTGGGA | 1565 | 1582 | 7059 | 7076 | SEQ ID | TCCCACCCCAGAGACATC | no data |
| 1942 | 1942 | | | | | | 3570 | | |
| SEQ ID | COMP ID | CCGATGTCTCTGGGGTGG | 1567 | 1584 | 7061 | 7078 | SEQ ID | CCACCCCAGAGACATCGG | 2.04 |
| 1943 | 1943 | | | | | | 3571 | | |
| SEQ ID | COMP ID | AGCCGATGTCTCTGGGGT | 1569 | 1586 | 7063 | 7080 | SEQ ID | ACCCCAGAGACATCGGCT | 1.96 |
| 1944 | 1944 | | | | | | 3572 | | |
| SEQ ID | COMP ID | ACAGCCGATGTCTCTGGG | 1571 | 1588 | 7065 | 7082 | SEQ ID | CCCAGAGACATCGGCTGT | 1.45 |
| 1945 | 1945 | | | | | | 3573 | | |
| SEQ ID | COMP ID | TCACAGCCGATGTCTCTG | 1573 | 1590 | 7067 | 7084 | SEQ ID | CAGAGACATCGGCTGTGA | 1.39 |
| 1946 | 1946 | | | | | | 3574 | | |
| SEQ ID | COMP ID | GGTCACAGCCGATGTCTC | 1575 | 1592 | 7069 | 7086 | SEQ ID | GAGACATCGGCTGTGACC | no data |
| 1947 | 1947 | | | | | | 3575 | | |
| SEQ ID | COMP ID | CTGGTCACAGCCGATGTC | 1577 | 1594 | 7071 | 7088 | SEQ ID | GACATCGGCTGTGACCAG | 1.68 |
| 1948 | 1948 | | | | | | 3576 | | |
| SEQ ID | COMP ID | TGCTGGTCACAGCCGATG | 1579 | 1596 | 7073 | 7090 | SEQ ID | CATCGGCTGTGACCAGCA | 1.41 |
| 1949 | 1949 | | | | | | 3577 | | |
| SEQ ID | COMP ID | TGTGCTGGTCACAGCCGA | 1581 | 1598 | 7075 | 7092 | SEQ ID | TCGGCTGTGACCAGCACA | 1.66 |
| 1950 | 1950 | | | | | | 3578 | | |
| SEQ ID | COMP ID | GGTGTGCTGGTCACAGCC | 1583 | 1600 | 7077 | 7094 | SEQ ID | GGCTGTGACCAGCACACC | no data |
| 1951 | 1951 | | | | | | 3579 | | |
| SEQ ID | COMP ID | CTGGTGTGCTGGTCACAG | 1585 | 1602 | 7079 | 7096 | SEQ ID | CTGTGACCAGCACACCAG | 1.66 |
| 1952 | 1952 | | | | | | 3580 | | |
| SEQ ID | COMP ID | AGCTGGTGTGCTGGTCAC | 1587 | 1604 | 7081 | 7098 | SEQ ID | GTGACCAGCACACCAGCT | 1.23 |
| 1953 | 1953 | | | | | | 3581 | | |
| SEQ ID | COMP ID | GCAGCTGGTGTGCTGGTC | 1589 | 1606 | 7083 | 7100 | SEQ ID | GACCAGCACACCAGCTGC | no data |
| 1954 | 1954 | | | | | | 3582 | | |
| SEQ ID | COMP ID | GGGCAGCTGGTGTGCTGG | 1591 | 1608 | 7085 | 7102 | SEQ ID | CCAGCACACCAGCTGCCC | no data |
| 1955 | 1955 | | | | | | 3583 | | |
| SEQ ID | COMP ID | CCGGGCAGCTGGTGTGCT | 1593 | 1610 | 7087 | 7104 | SEQ ID | AGCACACCAGCTGCCCGG | 1.54 |
| 1956 | 1956 | | | | | | 3584 | | |
| SEQ ID | COMP ID | CACCGGGCAGCTGGTGTG | 1595 | 1612 | 7089 | 7106 | SEQ ID | CACACCAGCTGCCCGGTG | 1.26 |
| 1957 | 1957 | | | | | | 3585 | | |
| SEQ ID | COMP ID | CCCACCGGGCAGCTGGTG | 1597 | 1614 | 7091 | 7108 | SEQ ID | CACCAGCTGCCCGGTGGG | 1.28 |
| 1958 | 1958 | | | | | | 3586 | | |
| SEQ ID | COMP ID | GCCCCACCGGGCAGCTGG | 1599 | 1616 | 7093 | 7110 | SEQ ID | CCAGCTGCCCGGTGGGGC | no data |
| 1959 | 1959 | | | | | | 3587 | | |
| SEQ ID | COMP ID | CTGCCCCACCGGGCAGCT | 1601 | 1618 | 7095 | 7112 | SEQ ID | AGCTGCCCGGTGGGGCAG | 1.46 |
| 1960 | 1960 | | | | | | 3588 | | |
| SEQ ID | COMP ID | GTCTGCCCCACCGGGCAG | 1603 | 1620 | 7097 | 7114 | SEQ ID | CTGCCCGGTGGGGCAGAC | no data |
| 1961 | 1961 | | | | | | 3589 | | |
| SEQ ID | COMP ID | AGGTCTGCCCCACCGGGC | 1605 | 1622 | 7099 | 7116 | SEQ ID | GCCCGGTGGGGCAGACCT | 1.21 |
| 1962 | 1962 | | | | | | 3590 | | |
| SEQ ID | COMP ID | GCAGGTCTGCCCCACCGG | 1607 | 1624 | 7101 | 7118 | SEQ ID | CCGGTGGGGCAGACCTGC | no data |
| 1963 | 1963 | | | | | | 3591 | | |
| SEQ ID | COMP ID | CAGCAGGTCTGCCCCACC | 1609 | 1626 | 7103 | 7120 | SEQ ID | GGTGGGGCAGACCTGCTG | 1.33 |
| 1964 | 1964 | | | | | | 3592 | | |
| SEQ ID | COMP ID | GGCAGCAGGTCTGCCCCA | 1611 | 1628 | 7105 | 7122 | SEQ ID | TGGGGCAGACCTGCTGCC | no data |
| 1965 | 1965 | | | | | | 3593 | | |
| SEQ ID | COMP ID | CGGGCAGCAGGTCTGCCC | 1613 | 1630 | 7107 | 7124 | SEQ ID | GGGCAGACCTGCTGCCCG | 1.52 |
| 1966 | 1966 | | | | | | 3594 | | |
| SEQ ID | COMP ID | CTCGGGCAGCAGGTCTGC | 1615 | 1632 | 7109 | 7126 | SEQ ID | GCAGACCTGCTGCCCGAG | 1.2 |
| 1967 | 1967 | | | | | | 3595 | | |
| SEQ ID | COMP ID | GGCTCGGGCAGCAGGTCT | 1617 | 1634 | 7111 | 7128 | SEQ ID | AGACCTGCTGCCCGAGCC | no data |
| 1968 | 1968 | | | | | | 3596 | | |
| SEQ ID | COMP ID | CAGGCTCGGGCAGCAGGT | 1619 | 1636 | 7113 | 7130 | SEQ ID | ACCTGCTGCCCGAGCCTG | no data |
| 1969 | 1969 | | | | | | 3597 | | |
| SEQ ID | COMP ID | CCCAGGCTCGGGCAGCAG | 1621 | 1638 | 7115 | 7132 | SEQ ID | CTGCTGCCCGAGCCTGGG | 1.2 |
| 1970 | 1970 | | | | | | 3598 | | |
| SEQ ID | COMP ID | CACCCAGGCTCGGGCAGC | 1623 | 1640 | 7117 | 7134 | SEQ ID | GCTGCCCGAGCCTGGGTG | 1.41 |
| 1971 | 1971 | | | | | | 3599 | | |
| SEQ ID | COMP ID | CCCACCCAGGCTCGGGCA | 1625 | 1642 | 7119 | 7136 | SEQ ID | TGCCCGAGCCTGGGTGGG | 1.24 |
| 1972 | 1972 | | | | | | 3600 | | |
| SEQ ID | COMP ID | CTCCCACCCAGGCTCGGG | 1627 | 1644 | 7121 | 7138 | SEQ ID | CCCGAGCCTGGGTGGGAG | 1.06 |
| 1973 | 1973 | | | | | | 3601 | | |
| SEQ ID | COMP ID | AGCTCCCACCCAGGCTCG | 1629 | 1646 | 7123 | 7140 | SEQ ID | CGAGCCTGGGTGGGAGCT | 1.24 |
| 1974 | 1974 | | | | | | 3602 | | |
| SEQ ID | COMP ID | CCAGCTCCCACCCAGGCT | 1631 | 1648 | 7125 | 7142 | SEQ ID | AGCCTGGGTGGGAGCTGG | 1.1 |
| 1975 | 1975 | | | | | | 3603 | | |
| SEQ ID | COMP ID | GCCCAGCTCCCACCCAGG | 1633 | 1650 | 7127 | 7144 | SEQ ID | CCTGGGTGGGAGCTGGGC | no data |
| 1976 | 1976 | | | | | | 3604 | | |
| SEQ ID | COMP ID | AGGCCCAGCTCCCACCCA | 1635 | 1652 | 7129 | 7146 | SEQ ID | TGGGTGGGAGCTGGGCCT | 1.08 |
| 1977 | 1977 | | | | | | 3605 | | |
| SEQ ID | COMP ID | GCAGGCCCAGCTCCCACC | 1637 | 1654 | 7131 | 7148 | SEQ ID | GGTGGGAGCTGGGCCTGC | no data |
| 1978 | 1978 | | | | | | 3606 | | |
| SEQ ID | COMP ID | CAGCAGGCCCAGCTCCCA | 1639 | 1656 | 7133 | 7150 | SEQ ID | TGGGAGCTGGGCCTGCTG | 1.24 |
| 1979 | 1979 | | | | | | 3607 | | |
| SEQ ID | COMP ID | GGCAGCAGGCCCAGCTCC | 1641 | 1658 | 7135 | 7152 | SEQ ID | GGAGCTGGGCCTGCTGCC | no data |
| 1980 | 1980 | | | | | | 3608 | | |
| SEQ ID | COMP ID | CTGGCAGCAGGCCCAGCT | 1643 | 1660 | 7137 | 7154 | SEQ ID | AGCTGGGCCTGCTGCCAG | 1.49 |
| 1981 | 1981 | | | | | | 3609 | | |
| SEQ ID | COMP ID | AACTGGCAGCAGGCCCAG | 1645 | 1662 | 7139 | 7156 | SEQ ID | CTGGGCCTGCTGCCAGTT | 1.25 |
| 1982 | 1982 | | | | | | 3610 | | |
| SEQ ID | COMP ID | GCAACTGGCAGCAGGCCC | 1647 | 1664 | 7141 | 7158 | SEQ ID | GGGCCTGCTGCCAGTTGC | no data |
| 1983 | 1983 | | | | | | 3611 | | |
| SEQ ID | COMP ID | GGGCAACTGGCAGCAGGC | 1649 | 1666 | 7143 | 7160 | SEQ ID | GCCTGCTGCCAGTTGCCC | no data |
| 1984 | 1984 | | | | | | 3612 | | |
| SEQ ID | COMP ID | TGGGGCAACTGGCAGCAG | 1651 | 1668 | 7145 | 7162 | SEQ ID | CTGCTGCCAGTTGCCCCA | 2.46 |
| 1985 | 1985 | | | | | | 3613 | | |
| SEQ ID | COMP ID | CATGGGGCAACTGGCAGC | 1653 | 1670 | 7147 | 7164 | SEQ ID | GCTGCCAGTTGCCCCATG | 2.39 |
| 1986 | 1986 | | | | | | 3614 | | |
| SEQ ID | COMP ID | CACATGGGGCAACTGGCA | | | 7149 | 7166 | SEQ ID | TGCCAGTTGCCCCATGTG | 1.23 |
| 1987 | 1987 | | | | | | 3615 | | |
| SEQ ID | COMP ID | CTCACATGGGGCAACTGG | | | 7151 | 7168 | SEQ ID | CCAGTTGCCCCATGTGAG | 1.23 |
| 1988 | 1988 | | | | | | 3616 | | |
| SEQ ID | COMP ID | CACTCACATGGGGCAACT | | | 7153 | 7170 | SEQ ID | AGTTGCCCCATGTGAGTG | 1.03 |
| 1989 | 1989 | | | | | | 3617 | | |
| SEQ ID | COMP ID | GGCACTCACATGGGGCAA | | | 7155 | 7172 | SEQ ID | TTGCCCCATGTGAGTGCC | no data |
| 1990 | 1990 | | | | | | 3618 | | |
| SEQ ID | COMP ID | GAGGCACTCACATGGGGC | | | 7157 | 7174 | SEQ ID | GCCCCATGTGAGTGCCTC | no data |
| 1991 | 1991 | | | | | | 3619 | | |
| SEQ ID | COMP ID | GGGAGGCACTCACATGGG | | | 7159 | 7176 | SEQ ID | CCCATGTGAGTGCCTCCC | no data |
| 1992 | 1992 | | | | | | 3620 | | |
| SEQ ID | COMP ID | CAGGGAGGCACTCACATG | | | 7161 | 7178 | SEQ ID | CATGTGAGTGCCTCCCTG | 1.3 |
| 1993 | 1993 | | | | | | 3621 | | |
| SEQ ID | COMP ID | GGCAGGGAGGCACTCACA | | | 7163 | 7180 | SEQ ID | TGTGAGTGCCTCCCTGCC | no data |
| 1994 | 1994 | | | | | | 3622 | | |
| SEQ ID | COMP ID | CAGGCAGGGAGGCACTCA | | | 7165 | 7182 | SEQ ID | TGAGTGCCTCCCTGCCTG | 1.14 |
| 1995 | 1995 | | | | | | 3623 | | |
| SEQ ID | COMP ID | GGCAGGCAGGGAGGCACT | | | 7167 | 7184 | SEQ ID | AGTGCCTCCCTGCCTGCC | 2.25 |
| 1996 | 1996 | | | | | | 3624 | | |
| SEQ ID | COMP ID | GGGGCAGGCAGGGAGGCA | | | 7169 | 7186 | SEQ ID | TGCCTCCCTGCCTGCCCC | 2.22 |
| 1997 | 1997 | | | | | | 3625 | | |
| SEQ ID | COMP ID | CAGGGGCAGGCAGGGAGG | | | 7171 | 7188 | SEQ ID | CCTCCCTGCCTGCCCCTG | 1.69 |
| 1998 | 1998 | | | | | | 3626 | | |
| SEQ ID | COMP ID | TCCAGGGGCAGGCAGGGA | | | 7173 | 7190 | SEQ ID | TCCCTGCCTGCCCCTGGA | 2.17 |
| 1999 | 1999 | | | | | | 3627 | | |
| SEQ ID | COMP ID | TATCCAGGGGCAGGCAGG | | | 7175 | 7192 | SEQ ID | CCTGCCTGCCCCTGGATA | 1.76 |
| 2000 | 2000 | | | | | | 3628 | | |
| SEQ ID | COMP ID | CCTATCCAGGGGCAGGCA | | | 7177 | 7194 | SEQ ID | TGCCTGCCCCTGGATAGG | 1.3 |
| 2001 | 2001 | | | | | | 3629 | | |
| SEQ ID | COMP ID | CCCCTATCCAGGGGCAGG | | | 7179 | 7196 | SEQ ID | CCTGCCCCTGGATAGGGG | 1.02 |
| 2002 | 2002 | | | | | | 3630 | | |
| SEQ ID | COMP ID | CTCCCCTATCCAGGGGCA | | | 7181 | 7198 | SEQ ID | TGCCCCTGGATAGGGGAG | 1.16 |
| 2003 | 2003 | | | | | | 3631 | | |
| SEQ ID | COMP ID | AGCTCCCCTATCCAGGGG | | | 7183 | 7200 | SEQ ID | CCCCTGGATAGGGGAGCT | 1.39 |
| 2004 | 2004 | | | | | | 3632 | | |
| SEQ ID | COMP ID | TTAGCTCCCCTATCCAGG | | | 7185 | 7202 | SEQ ID | CCTGGATAGGGGAGCTAA | 1.54 |
| 2005 | 2005 | | | | | | 3633 | | |
| SEQ ID | COMP ID | GCTTAGCTCCCCTATCCA | | | 7187 | 7204 | SEQ ID | TGGATAGGGGAGCTAAGC | no data |
| 2006 | 2006 | | | | | | 3634 | | |
| SEQ ID | COMP ID | GGGCTTAGCTCCCCTATC | | | 7189 | 7206 | SEQ ID | GATAGGGGAGCTAAGCCC | no data |
| 2007 | 2007 | | | | | | 3635 | | |
| SEQ ID | COMP ID | CTGGGCTTAGCTCCCCTA | | | 7191 | 7208 | SEQ ID | TAGGGGAGCTAAGCCCAG | 1.31 |
| 2008 | 2008 | | | | | | 3636 | | |
| SEQ ID | COMP ID | CACTGGGCTTAGCTCCCC | | | 7193 | 7210 | SEQ ID | GGGGAGCTAAGCCCAGTG | 1.15 |
| 2009 | 2009 | | | | | | 3637 | | |
| SEQ ID | COMP ID | CTCACTGGGCTTAGCTCC | | | 7195 | 7212 | SEQ ID | GGAGCTAAGCCCAGTGAG | 1.15 |
| 2010 | 2010 | | | | | | 3638 | | |
| SEQ ID | COMP ID | CCCTCACTGGGCTTAGCT | | | 7197 | 7214 | SEQ ID | AGCTAAGCCCAGTGAGGG | 1.25 |
| 2011 | 2011 | | | | | | 3639 | | |
| SEQ ID | COMP ID | GTTCCTGTCCCCTCACTG | | | 7206 | 7223 | SEQ ID | CAGTGAGGGGACAGGAAC | no data |
| 2012 | 2012 | | | | | | 3640 | | |
| SEQ ID | COMP ID | ATGTTCCTGTCCCCTCAC | | | 7208 | 7225 | SEQ ID | GTGAGGGGACAGGAACAT | 1.51 |
| 2013 | 2013 | | | | | | 3641 | | |
| SEQ ID | COMP ID | TTATGTTCCTGTCCCCTC | | | 7210 | 7227 | SEQ ID | GAGGGGACAGGAACATAA | 1.44 |
| 2014 | 2014 | | | | | | 3642 | | |
| SEQ ID | COMP ID | CATTATGTTCCTGTCCCC | | | 7212 | 7229 | SEQ ID | GGGGACAGGAACATAATG | 1.61 |
| 2015 | 2015 | | | | | | 3643 | | |
| SEQ ID | COMP ID | GGCATTATGTTCCTGTCC | | | 7214 | 7231 | SEQ ID | GGACAGGAACATAATGCC | no data |
| 2016 | 2016 | | | | | | 3644 | | |
| SEQ ID | COMP ID | ATGGCATTATGTTCCTGT | | | 7216 | 7233 | SEQ ID | ACAGGAACATAATGCCAT | 1.28 |
| 2017 | 2017 | | | | | | 3645 | | |
| SEQ ID | COMP ID | GAATGGCATTATGTTCCT | | | 7218 | 7235 | SEQ ID | AGGAACATAATGCCATTC | no data |
| 2018 | 2018 | | | | | | 3646 | | |
| SEQ ID | COMP ID | CAGAATGGCATTATGTTC | | | 7220 | 7237 | SEQ ID | GAACATAATGCCATTCTG | 1.34 |
| 2019 | 2019 | | | | | | 3647 | | |
| SEQ ID | COMP ID | CACAGAATGGCATTATGT | | | 7222 | 7239 | SEQ ID | ACATAATGCCATTCTGTG | 1.51 |
| 2020 | 2020 | | | | | | 3648 | | |
| SEQ ID | COMP ID | AGCACAGAATGGCATTAT | | | 7224 | 7241 | SEQ ID | ATAATGCCATTCTGTGCT | 1.46 |
| 2021 | 2021 | | | | | | 3649 | | |
| SEQ ID | COMP ID | GGAGCACAGAATGGCATT | | | 7226 | 7243 | SEQ ID | AATGCCATTCTGTGCTCC | no data |
| 2022 | 2022 | | | | | | 3650 | | |
| SEQ ID | COMP ID | AGGGAGCACAGAATGGCA | | | 7228 | 7245 | SEQ ID | TGCCATTCTGTGCTCCCT | 1.88 |
| 2023 | 2023 | | | | | | 3651 | | |
| SEQ ID | COMP ID | GAAGGGAGCACAGAATGG | | | 7230 | 7247 | SEQ ID | CCATTCTGTGCTCCCTTC | no data |
| 2024 | 2024 | | | | | | 3652 | | |
| SEQ ID | COMP ID | GGGAAGGGAGCACAGAAT | | | 7232 | 7249 | SEQ ID | ATTCTGTGCTCCCTTCCC | no data |
| 2025 | 2025 | | | | | | 3653 | | |
| SEQ ID | COMP ID | CGGGGAAGGGAGCACAGA | | | 7234 | 7251 | SEQ ID | TCTGTGCTCCCTTCCCCG | 2.53 |
| 2026 | 2026 | | | | | | 3654 | | |
| SEQ ID | COMP ID | GGCGGGGAAGGGAGCACA | | | 7236 | 7253 | SEQ ID | TGTGCTCCCTTCCCCGCC | no data |
| 2027 | 2027 | | | | | | 3655 | | |
| SEQ ID | COMP ID | CTGGCGGGGAAGGGAGCA | | | 7238 | 7255 | SEQ ID | TGCTCCCTTCCCCGCCAG | 2.66 |
| 2028 | 2028 | | | | | | 3656 | | |
| SEQ ID | COMP ID | GCCTGGCGGGGAAGGGAG | | | 7240 | 7257 | SEQ ID | CTCCCTTCCCCGCCAGGC | no data |
| 2029 | 2029 | | | | | | 3657 | | |
| SEQ ID | COMP ID | CAGCCTGGGGGGGAAGGG | | | 7242 | 7259 | SEQ ID | CCCTTCCCCGCCAGGCTG | no data |
| 2030 | 2030 | | | | | | 3658 | | |
| SEQ ID | COMP ID | CACAGCCTGGCGGGGAAG | | | 7244 | 7261 | SEQ ID | CTTCCCCGCCAGGCTGTG | 2.31 |
| 2031 | 2031 | | | | | | 3659 | | |
| SEQ ID | COMP ID | CACACAGCCTGGCGGGGA | | | 7246 | 7263 | SEQ ID | TCCCCGCCAGGCTGTGTG | 1.88 |
| 2032 | 2032 | | | | | | 3660 | | |
| SEQ ID | COMP ID | AGCACACAGCCTGGCGGG | | | 7248 | 7265 | SEQ ID | CCCGCCAGGCTGTGTGCT | 2 |
| 2033 | 2033 | | | | | | 3661 | | |
| SEQ ID | COMP ID | GCAGCACACAGCCTGGCG | | | 7250 | 7267 | SEQ ID | CGCCAGGCTGTGTGCTGC | no data |
| 2034 | 2034 | | | | | | 3662 | | |
| SEQ ID | COMP ID | TCGCAGCACACAGCCTGG | | | 7252 | 7269 | SEQ ID | CCAGGCTGTGTGCTGCGA | 1.26 |
| 2035 | 2035 | | | | | | 3663 | | |
| SEQ ID | COMP ID | CCTCGCAGCACACAGCCT | | | 7254 | 7271 | SEQ ID | AGGCTGTGTGCTGCGAGG | 1.35 |
| 2036 | 2036 | | | | | | 3664 | | |
| SEQ ID | COMP ID | ATCCTCGCAGCACACAGC | 1670 | 1687 | 7256 | 7273 | SEQ ID | GCTGTGTGCTGCGAGGAT | 1.4 |
| 2037 | 2037 | | | | | | 3665 | | |
| SEQ ID | COMP ID | CGATCCTCGCAGCACACA | 1672 | 1689 | 7258 | 7275 | SEQ ID | TGTGTGCTGCGAGGATCG | 1.21 |
| 2038 | 2038 | | | | | | 3666 | | |
| SEQ ID | COMP ID | GGCGATCCTCGCAGCACA | 1674 | 1691 | 7260 | 7277 | SEQ ID | TGTGCTGCGAGGATCGCC | no data |
| 2039 | 2039 | | | | | | 3667 | | |
| SEQ ID | COMP ID | CTGGCGATCCTCGCAGCA | 1676 | 1693 | 7262 | 7279 | SEQ ID | TGCTGCGAGGATCGCCAG | no data |
| 2040 | 2040 | | | | | | 3668 | | |
| SEQ ID | COMP ID | TGCTGGCGATCCTCGCAG | 1678 | 1695 | 7264 | 7281 | SEQ ID | CTGCGAGGATCGCCAGCA | 0.52 |
| 2041 | 2041 | | | | | | 3669 | | |
| SEQ ID | COMP ID | AGTGCTGGCGATCCTCGC | 1680 | 1697 | 7266 | 7283 | SEQ ID | GCGAGGATCGCCAGCACT | 1.75 |
| 2042 | 2042 | | | | | | 3670 | | |
| SEQ ID | COMP ID | GCAGTGCTGGCGATCCTC | 1682 | 1699 | 7268 | 7285 | SEQ ID | GAGGATCGCCAGCACTGC | no data |
| 2043 | 2043 | | | | | | 3671 | | |
| SEQ ID | COMP ID | CAGCAGTGCTGGCGATCC | 1684 | 1701 | 7270 | 7287 | SEQ ID | GGATCGCCAGCACTGCTG | 1.45 |
| 2044 | 2044 | | | | | | 3672 | | |
| SEQ ID | COMP ID | GGCAGCAGTGCTGGCGAT | 1686 | 1703 | 7272 | 7289 | SEQ ID | ATCGCCAGCACTGCTGCC | no data |
| 2045 | 2045 | | | | | | 3673 | | |
| SEQ ID | COMP ID | CGGGCAGCAGTGCTGGCG | 1688 | 1705 | 7274 | 7291 | SEQ ID | CGCCAGCACTGCTGCCCG | 0.55 |
| 2046 | 2046 | | | | | | 3674 | | |
| SEQ ID | COMP ID | GCCGGGCAGCAGTGCTGG | 1690 | 1707 | 7276 | 7293 | SEQ ID | CCAGCACTGCTGCCCGGC | no data |
| 2047 | 2047 | | | | | | 3675 | | |
| SEQ ID | COMP ID | CAGCCGGGCAGCAGTGCT | 1692 | 1709 | 7278 | 7295 | SEQ ID | AGCACTGCTGCCCGGCTG | 1.76 |
| 2048 | 2048 | | | | | | 3676 | | |
| SEQ ID | COMP ID | GCCAGCCGGGCAGCAGTG | 1694 | 1711 | 7280 | 7297 | SEQ ID | CACTGCTGCCCGGCTGGC | no data |
| 2049 | 2049 | | | | | | 3677 | | |
| SEQ ID | COMP ID | TAGCCAGCCGGGCAGCAG | 1696 | 1713 | 7282 | 7299 | SEQ ID | CTGCTGCCCGGCTGGCTA | 1.31 |
| 2050 | 2050 | | | | | | 3678 | | |
| SEQ ID | COMP ID | TGTAGCCAGCCGGGCAGC | 1698 | 1715 | 7284 | 7301 | SEQ ID | GCTGCCCGGCTGGCTACA | 1.35 |
| 2051 | 2051 | | | | | | 3679 | | |
| SEQ ID | COMP ID | GGTGTAGCCAGCCGGGCA | 1700 | 1717 | 7286 | 7303 | SEQ ID | TGCCCGGCTGGCTACACC | 1.71 |
| 2052 | 2052 | | | | | | 3680 | | |
| SEQ ID | COMP ID | CAGGTGTAGCCAGCCGGG | 1702 | 1719 | 7288 | 7305 | SEQ ID | CCCGGCTGGCTACACCTG | 1.56 |
| 2053 | 2053 | | | | | | 3681 | | |
| SEQ ID | COMP ID | TGCAGGTGTAGCCAGCCG | 1704 | 1721 | 7290 | 7307 | SEQ ID | CGGCTGGCTACACCTGCA | 1.43 |
| 2054 | 2054 | | | | | | 3682 | | |
| SEQ ID | COMP ID | GTTGCAGGTGTAGCCAGC | 1706 | 1723 | 7292 | 7309 | SEQ ID | GCTGGCTACACCTGCAAC | 1.76 |
| 2055 | 2055 | | | | | | 3683 | | |
| SEQ ID | COMP ID | ACGTTGCAGGTGTAGCCA | 1708 | 1725 | 7294 | 7311 | SEQ ID | TGGCTACACCTGCAACGT | 1.5 |
| 2056 | 2056 | | | | | | 3684 | | |
| SEQ ID | COMP ID | TCACGTTGCAGGTGTAGC | 1710 | 1727 | 7296 | 7313 | SEQ ID | GCTACACCTGCAACGTGA | 1.54 |
| 2057 | 2057 | | | | | | 3685 | | |
| SEQ ID | COMP ID | CTTCACGTTGCAGGTGTA | 1712 | 1729 | 7298 | 7315 | SEQ ID | TACACCTGCAACGTGAAG | 1.75 |
| 2058 | 2058 | | | | | | 3686 | | |
| SEQ ID | COMP ID | GCCTTCACGTTGCAGGTG | 1714 | 1731 | 7300 | 7317 | SEQ ID | CACCTGCAACGTGAAGGC | 1.76 |
| 2059 | 2059 | | | | | | 3687 | | |
| SEQ ID | COMP ID | GAGCCTTCACGTTGCAGG | 1716 | 1733 | 7302 | 7319 | SEQ ID | CCTGCAACGTGAAGGCTC | 1.72 |
| 2060 | 2060 | | | | | | 3688 | | |
| SEQ ID | COMP ID | TCGAGCCTTCACGTTGCA | 1718 | 1735 | 7304 | 7321 | SEQ ID | TGCAACGTGAAGGCTCGA | 2.03 |
| 2061 | 2061 | | | | | | 3689 | | |
| SEQ ID | COMP ID | GATCGAGCCTTCACGTTG | 1720 | 1737 | 7306 | 7323 | SEQ ID | CAACGTGAAGGCTCGATC | 1.41 |
| 2062 | 2062 | | | | | | 3690 | | |
| SEQ ID | COMP ID | AGGATCGAGCCTTCACGT | 1722 | 1739 | 7308 | 7325 | SEQ ID | ACGTGAAGGCTCGATCCT | 1.77 |
| 2063 | 2063 | | | | | | 3691 | | |
| SEQ ID | COMP ID | GCAGGATCGAGCCTTCAC | 1724 | 1741 | 7310 | 7327 | SEQ ID | GTGAAGGCTCGATCCTGC | 1.37 |
| 2064 | 2064 | | | | | | 3692 | | |
| SEQ ID | COMP ID | TCGCAGGATCGAGCCTTC | 1726 | 1743 | 7312 | 7329 | SEQ ID | GAAGGCTCGATCCTGCGA | 1.54 |
| 2065 | 2065 | | | | | | 3693 | | |
| SEQ ID | COMP ID | TCTCGCAGGATCGAGCCT | 1728 | 1745 | 7314 | 7331 | SEQ ID | AGGCTCGATCCTGCGAGA | 1.55 |
| 2066 | 2066 | | | | | | 3694 | | |
| SEQ ID | COMP ID | CTTCTCGCAGGATCGAGC | 1730 | 1747 | 7316 | 7333 | SEQ ID | GCTCGATCCTGCGAGAAG | 1.54 |
| 2067 | 2067 | | | | | | 3695 | | |
| SEQ ID | COMP ID | TCCTTCTCGCAGGATCGA | 1732 | 1749 | 7318 | 7335 | SEQ ID | TCGATCCTGCGAGAAGGA | 1.53 |
| 2068 | 2068 | | | | | | 3696 | | |
| SEQ ID | COMP ID | CTTCCTTCTCGCAGGATC | 1734 | 1751 | 7320 | 7337 | SEQ ID | GATCCTGCGAGAAGGAAG | 1.21 |
| 2069 | 2069 | | | | | | 3697 | | |
| SEQ ID | COMP ID | CACTTCCTTCTCGCAGGA | 1736 | 1753 | 7322 | 7339 | SEQ ID | TCCTGCGAGAAGGAAGTG | 1.89 |
| 2070 | 2070 | | | | | | 3698 | | |
| SEQ ID | COMP ID | ACCACTTCCTTCTCGCAG | 1738 | 1755 | 7324 | 7341 | SEQ ID | CTGCGAGAAGGAAGTGGT | 1.49 |
| 2071 | 2071 | | | | | | 3699 | | |
| SEQ ID | COMP ID | AGACCACTTCCTTCTCGC | 1740 | 1757 | 7326 | 7343 | SEQ ID | GCGAGAAGGAAGTGGTCT | 1.54 |
| 2072 | 2072 | | | | | | 3700 | | |
| SEQ ID | COMP ID | AGAGACCACTTCCTTCTC | 1742 | 1759 | 7328 | 7345 | SEQ ID | GAGAAGGAAGTGGTCTCT | 1.52 |
| 2073 | 2073 | | | | | | 3701 | | |
| SEQ ID | COMP ID | GCAGAGACCACTTCCTTC | 1744 | 1761 | 7330 | 7347 | SEQ ID | GAAGGAAGTGGTCTCTGC | 1.38 |
| 2074 | 2074 | | | | | | 3702 | | |
| SEQ ID | COMP ID | GGGCAGAGACCACTTCCT | 1746 | 1763 | 7332 | 7349 | SEQ ID | AGGAAGTGGTCTCTGCCC | 1.54 |
| 2075 | 2075 | | | | | | 3703 | | |
| SEQ ID | COMP ID | CTGGGCAGAGACCACTTC | 1748 | 1765 | 7334 | 7351 | SEQ ID | GAAGTGGTCTCTGCCCAG | 1.5 |
| 2076 | 2076 | | | | | | 3704 | | |
| SEQ ID | COMP ID | GGCTGGGCAGAGACCACT | 1750 | 1767 | 7336 | 7353 | SEQ ID | AGTGGTCTCTGCCCAGCC | 1.37 |
| 2077 | 2077 | | | | | | 3705 | | |
| SEQ ID | COMP ID | CAGGCTGGGCAGAGACCA | 1752 | 1769 | 7338 | 7355 | SEQ ID | TGGTCTCTGCCCAGCCTG | 1.24 |
| 2078 | 2078 | | | | | | 3706 | | |
| SEQ ID | COMP ID | GGCAGGCTGGGCAGAGAC | 1754 | 1771 | 7340 | 7357 | SEQ ID | GTCTCTGCCCAGCCTGCC | 1.59 |
| 2079 | 2079 | | | | | | 3707 | | |
| SEQ ID | COMP ID | GTGGCAGGCTGGGCAGAG | 1756 | 1773 | 7342 | 7359 | SEQ ID | CTCTGCCCAGCCTGCCAC | 1.83 |
| 2080 | 2080 | | | | | | 3708 | | |
| SEQ ID | COMP ID | AGGTGGCAGGCTGGGCAG | 1758 | 1775 | 7344 | 7361 | SEQ ID | CTGCCCAGCCTGCCACCT | 2.4 |
| 2081 | 2081 | | | | | | 3709 | | |
| SEQ ID | COMP ID | GAAGGTGGCAGGCTGGGC | 1760 | 1777 | 7346 | 7363 | SEQ ID | GCCCAGCCTGCCACCTTC | 2.38 |
| 2082 | 2082 | | | | | | 3710 | | |
| SEQ ID | COMP ID | AGGAAGGTGGCAGGCTGG | 1762 | 1779 | 7348 | 7365 | SEQ ID | CCAGCCTGCCACCTTCCT | 2.34 |
| 2083 | 2083 | | | | | | 3711 | | |
| SEQ ID | COMP ID | CCAGGAAGGTGGCAGGCT | 1764 | 1781 | 7350 | 7367 | SEQ ID | AGCCTGCCACCTTCCTGG | 1.97 |
| 2084 | 2084 | | | | | | 3712 | | |
| SEQ ID | COMP ID | GGCCAGGAAGGTGGCAGG | 1766 | 1783 | 7352 | 7369 | SEQ ID | CCTGCCACCTTCCTGGCC | 1.51 |
| 2085 | 2085 | | | | | | 3713 | | |
| SEQ ID | COMP ID | CGGGCCAGGAAGGTGGCA | 1768 | 1785 | 7354 | 7371 | SEQ ID | TGCCACCTTCCTGGCCCG | 1.58 |
| 2086 | 2086 | | | | | | 3714 | | |
| SEQ ID | COMP ID | TACGGGCCAGGAAGGTGG | 1770 | 1787 | 7356 | 7373 | SEQ ID | CCACCTTCCTGGCCCGTA | 1.54 |
| 2087 | 2087 | | | | | | 3715 | | |
| SEQ ID | COMP ID | GCTACGGGCCAGGAAGGT | 1772 | 1789 | 7358 | 7375 | SEQ ID | ACCTTCCTGGCCCGTAGC | 1.96 |
| 2088 | 2088 | | | | | | 3716 | | |
| SEQ ID | COMP ID | GGGCTACGGGCCAGGAAG | 1774 | 1791 | 7360 | 7377 | SEQ ID | CTTCCTGGCCCGTAGCCC | 1.89 |
| 2089 | 2089 | | | | | | 3717 | | |
| SEQ ID | COMP ID | GAGGGCTACGGGCCAGGA | 1776 | 1793 | 7362 | 7379 | SEQ ID | TCCTGGCCCGTAGCCCTC | 1.81 |
| 2090 | 2090 | | | | | | 3718 | | |
| SEQ ID | COMP ID | GTGAGGGCTACGGGCCAG | 1778 | 1795 | 7364 | 7381 | SEQ ID | CTGGCCCGTAGCCCTCAC | 1.54 |
| 2091 | 2091 | | | | | | 3719 | | |
| SEQ ID | COMP ID | ACGTGAGGGCTACGGGCC | 1780 | 1797 | 7366 | 7383 | SEQ ID | GGCCCGTAGCCCTCACGT | 1.6 |
| 2092 | 2092 | | | | | | 3720 | | |
| SEQ ID | COMP ID | CCACGTGAGGGCTACGGG | 1782 | 1799 | 7368 | 7385 | SEQ ID | CCCGTAGCCCTCACGTGG | 2.07 |
| 2093 | 2093 | | | | | | 3721 | | |
| SEQ ID | COMP ID | ACCCACGTGAGGGCTACG | 1784 | 1801 | 7370 | 7387 | SEQ ID | CGTAGCCCTCACGTGGGT | 1.51 |
| 2094 | 2094 | | | | | | 3722 | | |
| SEQ ID | COMP ID | ACACCCACGTGAGGGCTA | 1786 | 1803 | 7372 | 7389 | SEQ ID | TAGCCCTCACGTGGGTGT | 1.95 |
| 2095 | 2095 | | | | | | 3723 | | |
| SEQ ID | COMP ID | TCACACCCACGTGAGGGC | 1788 | 1805 | 7374 | 7391 | SEQ ID | GCCCTCACGTGGGTGTGA | 1.32 |
| 2096 | 2096 | | | | | | 3724 | | |
| SEQ ID | COMP ID | CTTCACACCCACGTGAGG | 1790 | 1807 | 7376 | 7393 | SEQ ID | CCTCACGTGGGTGTGAAG | 1.94 |
| 2097 | 2097 | | | | | | 3725 | | |
| SEQ ID | COMP ID | TCCTTCACACCCACGTGA | 1792 | 1809 | 7378 | 7395 | SEQ ID | TCACGTGGGTGTGAAGGA | 1.31 |
| 2098 | 2098 | | | | | | 3726 | | |
| SEQ ID | COMP ID | CGTCCTTCACACCCACGT | 1794 | 1811 | 7380 | 7397 | SEQ ID | ACGTGGGTGTGAAGGACG | 1.08 |
| 2099 | 2099 | | | | | | 3727 | | |
| SEQ ID | COMP ID | CACGTCCTTCACACCCAC | 1796 | 1813 | 7382 | 7399 | SEQ ID | GTGGGTGTGAAGGACGTG | 0.95 |
| 2100 | 2100 | | | | | | 3728 | | |
| SEQ ID | COMP ID | TCCACGTCCTTCACACCC | 1798 | 1815 | 7384 | 7401 | SEQ ID | GGGTGTGAAGGACGTGGA | 1.16 |
| 2101 | 2101 | | | | | | 3729 | | |
| SEQ ID | COMP ID | ACTCCACGTCCTTCACAC | 1800 | 1817 | 7386 | 7403 | SEQ ID | GTGTGAAGGACGTGGAGT | 1.05 |
| 2102 | 2102 | | | | | | 3730 | | |
| SEQ ID | COMP ID | ACACTCCACGTCCTTCAC | 1802 | 1819 | 7388 | 7405 | SEQ ID | GTGAAGGACGTGGAGTGT | 1.35 |
| 2103 | 2103 | | | | | | 3731 | | |
| SEQ ID | COMP ID | CCACACTCCACGTCCTTC | 1804 | 1821 | 7390 | 7407 | SEQ ID | GAAGGACGTGGAGTGTGG | 1.02 |
| 2104 | 2104 | | | | | | 3732 | | |
| SEQ ID | COMP ID | CCCCACACTCCACGTCCT | 1806 | 1823 | 7392 | 7409 | SEQ ID | AGGACGTGGAGTGTGGGG | 1.2 |
| 2105 | 2105 | | | | | | 3733 | | |
| SEQ ID | COMP ID | TTCCCCACACTCCACGTC | 1808 | 1825 | 7394 | 7411 | SEQ ID | GACGTGGAGTGTGGGGAA | 1.18 |
| 2106 | 2106 | | | | | | 3734 | | |
| SEQ ID | COMP ID | CCTTCCCCACACTCCACG | 1810 | 1827 | 7396 | 7413 | SEQ ID | CGTGGAGTGTGGGGAAGG | 1.1 |
| 2107 | 2107 | | | | | | 3735 | | |
| SEQ ID | COMP ID | GTCCTTCCCCACACTCCA | 1812 | 1829 | 7398 | 7415 | SEQ ID | TGGAGTGTGGGGAAGGAC | 1.36 |
| 2108 | 2108 | | | | | | 3736 | | |
| SEQ ID | COMP ID | GTGTCCTTCCCCACACTC | 1814 | 1831 | 7400 | 7417 | SEQ ID | GAGTGTGGGGAAGGACAC | 1.45 |
| 2109 | 2109 | | | | | | 3737 | | |
| SEQ ID | COMP ID | AAGTGTCCTTCCCCACAC | 1816 | 1833 | 7402 | 7419 | SEQ ID | GTGTGGGGAAGGACACTT | 1.26 |
| 2110 | 2110 | | | | | | 3738 | | |
| SEQ ID | COMP ID | AGAAGTGTCCTTCCCCAC | 1818 | 1835 | 7404 | 7421 | SEQ ID | GTGGGGAAGGACACTTCT | 1.44 |
| 2111 | 2111 | | | | | | 3739 | | |
| SEQ ID | COMP ID | GCAGAAGTGTCCTTCCCC | 1820 | 1837 | 7406 | 7423 | SEQ ID | GGGGAAGGACACTTCTGC | 1.16 |
| 2112 | 2112 | | | | | | 3740 | | |
| SEQ ID | COMP ID | TGGCAGAAGTGTCCTTCC | 1822 | 1839 | 7408 | 7425 | SEQ ID | GGAAGGACACTTCTGCCA | 1.42 |
| 2113 | 2113 | | | | | | 3741 | | |
| SEQ ID | COMP ID | CATGGCAGAAGTGTCCTT | 1824 | 1841 | 7410 | 7427 | SEQ ID | AAGGACACTTCTGCCATG | 1.12 |
| 2114 | 2114 | | | | | | 3742 | | |
| SEQ ID | COMP ID | ATCATGGCAGAAGTGTCC | 1826 | 1843 | 7412 | 7429 | SEQ ID | GGACACTTCTGCCATGAT | 1.44 |
| 2115 | 2115 | | | | | | 3743 | | |
| SEQ ID | COMP ID | TTATCATGGCAGAAGTGT | 1828 | 1845 | 7414 | 7431 | SEQ ID | ACACTTCTGCCATGATAA | 1.57 |
| 2116 | 2116 | | | | | | 3744 | | |
| SEQ ID | COMP ID | GGTTATCATGGCAGAAGT | 1830 | 1847 | 7416 | 7433 | SEQ ID | ACTTCTGCCATGATAACC | 1.48 |
| 2117 | 2117 | | | | | | 3745 | | |
| SEQ ID | COMP ID | CTGGTTATCATGGCAGAA | 1832 | 1849 | 7418 | 7435 | SEQ ID | TTCTGCCATGATAACCAG | 1.49 |
| 2118 | 2118 | | | | | | 3746 | | |
| SEQ ID | COMP ID | GTCTGGTTATCATGGCAG | 1834 | 1851 | 7420 | 7437 | SEQ ID | CTGCCATGATAACCAGAC | 1.72 |
| 2119 | 2119 | | | | | | 3747 | | |
| SEQ ID | COMP ID | AGGTCTGGTTATCATGGC | 1836 | 1853 | 7422 | 7439 | SEQ ID | GCCATGATAACCAGACCT | 1.71 |
| 2120 | 2120 | | | | | | 3748 | | |
| SEQ ID | COMP ID | GCAGGTCTGGTTATCATG | 1838 | 1855 | 7424 | 7441 | SEQ ID | CATGATAACCAGACCTGC | 1.59 |
| 2121 | 2121 | | | | | | 3749 | | |
| SEQ ID | COMP ID | CAGCAGGTCTGGTTATCA | 1840 | 1857 | 7426 | 7443 | SEQ ID | TGATAACCAGACCTGCTG | 1.56 |
| 2122 | 2122 | | | | | | 3750 | | |
| SEQ ID | COMP ID | GGCAGCAGGTCTGGTTAT | 1842 | 1859 | 7428 | 7445 | SEQ ID | ATAACCAGACCTGCTGCC | 1.54 |
| 2123 | 2123 | | | | | | 3751 | | |
| SEQ ID | COMP ID | TCGGCAGCAGGTCTGGTT | 1844 | 1861 | 7430 | 7447 | SEQ ID | AACCAGACCTGCTGCCGA | 1.89 |
| 2124 | 2124 | | | | | | 3752 | | |
| SEQ ID | COMP ID | TCTCGGCAGCAGGTCTGG | 1846 | 1863 | 7432 | 7449 | SEQ ID | CCAGACCTGCTGCCGAGA | 1.54 |
| 2125 | 2125 | | | | | | 3753 | | |
| SEQ ID | COMP ID | TGTCTCGGCAGCAGGTCT | 1848 | 1865 | 7434 | 7451 | SEQ ID | AGACCTGCTGCCGAGACA | 1.58 |
| 2126 | 2126 | | | | | | 3754 | | |
| SEQ ID | COMP ID | GTTGTCTCGGCAGCAGGT | 1850 | 1867 | 7436 | 7453 | SEQ ID | ACCTGCTGCCGAGACAAC | 1.58 |
| 2127 | 2127 | | | | | | 3755 | | |
| SEQ ID | COMP ID | CGGTTGTCTCGGCAGCAG | 1852 | 1869 | 7438 | 7455 | SEQ ID | CTGCTGCCGAGACAACCG | no data |
| 2128 | 2128 | | | | | | 3756 | | |
| SEQ ID | COMP ID | GTCGGTTGTCTCGGCAGC | 1854 | 1871 | 7440 | 7457 | SEQ ID | GCTGCCGAGACAACCGAC | no data |
| 2129 | 2129 | | | | | | 3757 | | |
| SEQ ID | COMP ID | CTGTCGGTTGTCTCGGCA | 1856 | 1873 | 7442 | 7459 | SEQ ID | TGCCGAGACAACCGACAG | no data |
| 2130 | 2130 | | | | | | 3758 | | |
| SEQ ID | COMP ID | CCCTGTCGGTTGTCTCGG | 1858 | 1875 | 7444 | 7461 | SEQ ID | CCGAGACAACCGACAGGG | no data |
| 2131 | 2131 | | | | | | 3759 | | |
| SEQ ID | COMP ID | AGCCCTGTCGGTTGTCTC | 1860 | 1877 | 7446 | 7463 | SEQ ID | GAGACAACCGACAGGGCT | no data |
| 2132 | 2132 | | | | | | 3760 | | |
| SEQ ID | COMP ID | CCAGCCCTGTCGGTTGTC | 1862 | 1879 | 7448 | 7465 | SEQ ID | GACAACCGACAGGGCTGG | no data |
| 2133 | 2133 | | | | | | 3761 | | |
| SEQ ID | COMP ID | GCCCAGCCCTGTCGGTTG | 1864 | 1881 | 7450 | 7467 | SEQ ID | CAACCGACAGGGCTGGGC | no data |
| 2134 | 2134 | | | | | | 3762 | | |
| SEQ ID | COMP ID | AGGCCCAGCCCTGTCGGT | 1866 | 1883 | 7452 | 7469 | SEQ ID | ACCGACAGGGCTGGGCCT | no data |
| 2135 | 2135 | | | | | | 3763 | | |
| SEQ ID | COMP ID | GCAGGCCCAGCCCTGTCG | 1868 | 1885 | 7454 | 7471 | SEQ ID | CGACAGGGCTGGGCCTGC | no data |
| 2136 | 2136 | | | | | | 3764 | | |
| SEQ ID | COMP ID | CAGCAGGCCCAGCCCTGT | 1870 | 1887 | 7456 | 7473 | SEQ ID | ACAGGGCTGGGCCTGCTG | no data |
| 2137 | 2137 | | | | | | 3765 | | |
| SEQ ID | COMP ID | GACAGCAGGCCCAGCCCT | 1872 | 1889 | 7458 | 7475 | SEQ ID | AGGGCTGGGCCTGCTGTC | no data |
| 2138 | 2138 | | | | | | 3766 | | |
| SEQ ID | COMP ID | GGGACAGCAGGCCCAGCC | 1874 | 1891 | 7460 | 7477 | SEQ ID | GGCTGGGCCTGCTGTCCC | no data |
| 2139 | 2139 | | | | | | 3767 | | |
| SEQ ID | COMP ID | TAGGGACAGCAGGCCCAG | 1876 | 1893 | 7462 | 7479 | SEQ ID | CTGGGCCTGCTGTCCCTA | no data |
| 2140 | 2140 | | | | | | 3768 | | |
| SEQ ID | COMP ID | GGTAGGGACAGCAGGCCC | 1878 | 1895 | 7464 | 7481 | SEQ ID | GGGCCTGCTGTCCCTACC | no data |
| 2141 | 2141 | | | | | | 3769 | | |
| SEQ ID | COMP ID | GCGGTAGGGACAGCAGGC | 1880 | 1897 | 7466 | 7483 | SEQ ID | GCCTGCTGTCCCTACCGC | no data |
| 2142 | 2142 | | | | | | 3770 | | |
| SEQ ID | COMP ID | TGGCGGTAGGGACAGCAG | 1882 | 1899 | 7468 | 7485 | SEQ ID | CTGCTGTCCCTACCGCCA | no data |
| 2143 | 2143 | | | | | | 3771 | | |
| SEQ ID | COMP ID | ATGGGGGTTGGCACTGAC | | | 7487 | 7504 | SEQ ID | GTCAGTGCCAACCCCCAT | no data |
| 2144 | 2144 | | | | | | 3772 | | |
| SEQ ID | COMP ID | GGATGGGGGTTGGCACTG | | | 7489 | 7506 | SEQ ID | CAGTGCCAACCCCCATCC | no data |
| 2145 | 2145 | | | | | | 3773 | | |
| SEQ ID | COMP ID | CAGGATGGGGGTTGGCAC | | | 7491 | 7508 | SEQ ID | GTGCCAACCCCCATCCTG | 2.44 |
| 2146 | 2146 | | | | | | 3774 | | |
| SEQ ID | COMP ID | CCCAGGATGGGGGTTGGC | | | 7493 | 7510 | SEQ ID | GCCAACCCCCATCCTGGG | 1.56 |
| 2147 | 2147 | | | | | | 3775 | | |
| SEQ ID | COMP ID | GCCCCAGGATGGGGGTTG | | | 7495 | 7512 | SEQ ID | CAACCCCCATCCTGGGGC | 1.74 |
| 2148 | 2148 | | | | | | 3776 | | |
| SEQ ID | COMP ID | CAGCCCCAGGATGGGGGT | | | 7497 | 7514 | SEQ ID | ACCCCCATCCTGGGGCTG | 1.31 |
| 2149 | 2149 | | | | | | 3777 | | |
| SEQ ID | COMP ID | CCCAGCCCCAGGATGGGG | | | 7499 | 7516 | SEQ ID | CCCCATCCTGGGGCTGGG | 1.38 |
| 2150 | 2150 | | | | | | 3778 | | |
| SEQ ID | COMP ID | TACCCAGCCCCAGGATGG | | | 7501 | 7518 | SEQ ID | CCATCCTGGGGCTGGGTA | 1.22 |
| 2151 | 2151 | | | | | | 3779 | | |
| SEQ ID | COMP ID | CATACCCAGCCCCAGGAT | | | 7503 | 7520 | SEQ ID | ATCCTGGGGCTGGGTATG | 1.33 |
| 2152 | 2152 | | | | | | 3780 | | |
| SEQ ID | COMP ID | GCCATACCCAGCCCCAGG | | | 7505 | 7522 | SEQ ID | CCTGGGGCTGGGTATGGC | 1.15 |
| 2153 | 2153 | | | | | | 3781 | | |
| SEQ ID | COMP ID | TGGCCATACCCAGCCCCA | | | 7507 | 7524 | SEQ ID | TGGGGCTGGGTATGGCCA | 1.39 |
| 2154 | 2154 | | | | | | 3782 | | |
| SEQ ID | COMP ID | CCTGGCCATACCCAGCCC | | | 7509 | 7526 | SEQ ID | GGGCTGGGTATGGCCAGG | 1.13 |
| 2155 | 2155 | | | | | | 3783 | | |
| SEQ ID | COMP ID | TCCCTGGCCATACCCAGC | | | 7511 | 7528 | SEQ ID | GCTGGGTATGGCCAGGGA | 1.46 |
| 2156 | 2156 | | | | | | 3784 | | |
| SEQ ID | COMP ID | GGTCCCTGGCCATACCCA | | | 7513 | 7530 | SEQ ID | TGGGTATGGCCAGGGACC | 1.1 |
| 2157 | 2157 | | | | | | 3785 | | |
| SEQ ID | COMP ID | CTGGTCCCTGGCCATACC | | | 7515 | 7532 | SEQ ID | GGTATGGCCAGGGACCAG | 1.5 |
| 2158 | 2158 | | | | | | 3786 | | |
| SEQ ID | COMP ID | ACCTGGTCCCTGGCCATA | | | 7517 | 7534 | SEQ ID | TATGGCCAGGGACCAGGT | 1.16 |
| 2159 | 2159 | | | | | | 3787 | | |
| SEQ ID | COMP ID | GGACCTGGTCCCTGGCCA | | | 7519 | 7536 | SEQ ID | TGGCCAGGGACCAGGTCC | 2.1 |
| 2160 | 2160 | | | | | | 3788 | | |
| SEQ ID | COMP ID | GAGGTGGGACCTGGTCCC | | | 7525 | 7542 | SEQ ID | GGGACCAGGTCCCACCTC | 1.45 |
| 2161 | 2161 | | | | | | 3789 | | |
| SEQ ID | COMP ID | ACGAGGTGGGACCTGGTC | | | 7527 | 7544 | SEQ ID | GACCAGGTCCCACCTCGT | 1.86 |
| 2162 | 2162 | | | | | | 3790 | | |
| SEQ ID | COMP ID | GGACGAGGTGGGACCTGG | | | 7529 | 7546 | SEQ ID | CCAGGTCCCACCTCGTCC | 1.63 |
| 2163 | 2163 | | | | | | 3791 | | |
| SEQ ID | COMP ID | TTGGACGAGGTGGGACCT | | | 7531 | 7548 | SEQ ID | AGGTCCCACCTCGTCCAA | 1.49 |
| 2164 | 2164 | | | | | | 3792 | | |
| SEQ ID | COMP ID | GGTTGGACGAGGTGGGAC | | | 7533 | 7550 | SEQ ID | GTCCCACCTCGTCCAACC | 1.86 |
| 2165 | 2165 | | | | | | 3793 | | |
| SEQ ID | COMP ID | AGGGTTGGACGAGGTGGG | | | 7535 | 7552 | SEQ ID | CCCACCTCGTCCAACCCT | 2.12 |
| 2166 | 2166 | | | | | | 3794 | | |
| SEQ ID | COMP ID | AGAGGGTTGGACGAGGTG | | | 7537 | 7554 | SEQ ID | CACCTCGTCCAACCCTCT | 1.83 |
| 2167 | 2167 | | | | | | 3795 | | |
| SEQ ID | COMP ID | CGAGAGGGTTGGACGAGG | | | 7539 | 7556 | SEQ ID | CCTCGTCCAACCCTCTCG | 1.98 |
| 2168 | 2168 | | | | | | 3796 | | |
| SEQ ID | COMP ID | GGCGAGAGGGTTGGACGA | | | 7541 | 7558 | SEQ ID | TCGTCCAACCCTCTCGCC | 1.79 |
| 2169 | 2169 | | | | | | 3797 | | |
| SEQ ID | COMP ID | GGGGCGAGAGGGTTGGAC | | | 7543 | 7560 | SEQ ID | GTCCAACCCTCTCGCCCC | 2.44 |
| 2170 | 2170 | | | | | | 3798 | | |
| SEQ ID | COMP ID | GGGGGGCGAGAGGGTTGG | | | 7545 | 7562 | SEQ ID | CCAACCCTCTCGCCCCCC | 2.34 |
| 2171 | 2171 | | | | | | 3799 | | |
| SEQ ID | COMP ID | GAGGGGGGCGAGAGGGTT | | | 7547 | 7564 | SEQ ID | AACCCTCTCGCCCCCCTC | 2.15 |
| 2172 | 2172 | | | | | | 3800 | | |
| SEQ ID | COMP ID | CAGAGGGGGGCGAGAGGG | | | 7549 | 7566 | SEQ ID | CCCTCTCGCCCCCCTCTG | 2.09 |
| 2173 | 2173 | | | | | | 3801 | | |
| SEQ ID | COMP ID | GTCAGAGGGGGGCGAGAG | | | 7551 | 7568 | SEQ ID | CTCTCGCCCCCCTCTGAC | 2.16 |
| 2174 | 2174 | | | | | | 3802 | | |
| SEQ ID | COMP ID | TGGTCAGAGGGGGGCGAG | | | 7553 | 7570 | SEQ ID | CTCGCCCCCCTCTGACCA | 2.56 |
| 2175 | 2175 | | | | | | 3803 | | |
| SEQ ID | COMP ID | GATGGTCAGAGGGGGGCG | | | 7555 | 7572 | SEQ ID | CGCCCCCCTCTGACCATC | 2.36 |
| 2176 | 2176 | | | | | | 3804 | | |
| SEQ ID | COMP ID | TGGATGGTCAGAGGGGGG | | | 7557 | 7574 | SEQ ID | CCCCCCTCTGACCATCCA | 2.84 |
| 2177 | 2177 | | | | | | 3805 | | |
| SEQ ID | COMP ID | ATCAGCACAACAGACGCC | 1901 | 1918 | 7576 | 7593 | SEQ ID | GGCGTCTGTTGTGCTGAT | 1.13 |
| 2178 | 2178 | | | | | | 3806 | | |
| SEQ ID | COMP ID | CGATCAGCACAACAGACG | 1903 | 1920 | 7578 | 7595 | SEQ ID | CGTCTGTTGTGCTGATCG | 1.26 |
| 2179 | 2179 | | | | | | 3807 | | |
| SEQ ID | COMP ID | GCCGATCAGCACAACAGA | 1905 | 1922 | 7580 | 7597 | SEQ ID | TCTGTTGTGCTGATCGGC | 1.43 |
| 2180 | 2180 | | | | | | 3808 | | |
| SEQ ID | COMP ID | GCGCCGATCAGCACAACA | 1907 | 1924 | 7582 | 7599 | SEQ ID | TGTTGTGCTGATCGGCGC | 1.83 |
| 2181 | 2181 | | | | | | 3809 | | |
| SEQ ID | COMP ID | TGGCGCCGATCAGCACAA | 1909 | 1926 | 7584 | 7601 | SEQ ID | TTGTGCTGATCGGCGCCA | 1.59 |
| 2182 | 2182 | | | | | | 3810 | | |
| SEQ ID | COMP ID | AGTGGCGCCGATCAGCAC | 1911 | 1928 | 7586 | 7603 | SEQ ID | GTGCTGATCGGCGCCACT | 1.86 |
| 2183 | 2183 | | | | | | 3811 | | |
| SEQ ID | COMP ID | GCAGTGGCGCCGATCAGC | 1913 | 1930 | 7588 | 7605 | SEQ ID | GCTGATCGGCGCCACTGC | 1.73 |
| 2184 | 2184 | | | | | | 3812 | | |
| SEQ ID | COMP ID | CAGCAGTGGCGCCGATCA | 1915 | 1932 | 7590 | 7607 | SEQ ID | TGATCGGCGCCACTGCTG | 1.63 |
| 2185 | 2185 | | | | | | 3813 | | |
| SEQ ID | COMP ID | GACAGCAGTGGCGCCGAT | 1917 | 1934 | 7592 | 7609 | SEQ ID | ATCGGCGCCACTGCTGTC | 1.67 |
| 2186 | 2186 | | | | | | 3814 | | |
| SEQ ID | COMP ID | AGGACAGCAGTGGCGCCG | 1919 | 1936 | 7594 | 7611 | SEQ ID | CGGCGCCACTGCTGTCCT | 1.63 |
| 2187 | 2187 | | | | | | 3815 | | |
| SEQ ID | COMP ID | GCAGGACAGCAGTGGCGC | 1921 | 1938 | 7596 | 7613 | SEQ ID | GCGCCACTGCTGTCCTGC | 1.39 |
| 2188 | 2188 | | | | | | 3816 | | |
| SEQ ID | COMP ID | CAGCAGGACAGCAGTGGC | 1923 | 1940 | 7598 | 7615 | SEQ ID | GCCACTGCTGTCCTGCTG | 1.3 |
| 2189 | 2189 | | | | | | 3817 | | |
| SEQ ID | COMP ID | GCCAGCAGGACAGCAGTG | 1925 | 1942 | 7600 | 7617 | SEQ ID | CACTGCTGTCCTGCTGGC | 1.38 |
| 2190 | 2190 | | | | | | 3818 | | |
| SEQ ID | COMP ID | AAGCCAGCAGGACAGCAG | 1927 | 1944 | 7602 | 7619 | SEQ ID | CTGCTGTCCTGCTGGCTT | 1.44 |
| 2191 | 2191 | | | | | | 3819 | | |
| SEQ ID | COMP ID | GGAAGCCAGCAGGACAGC | 1929 | 1946 | 7604 | 7621 | SEQ ID | GCTGTCCTGCTGGCTTCC | 1.23 |
| 2192 | 2192 | | | | | | 3820 | | |
| SEQ ID | COMP ID | GCGGAAGCCAGCAGGACA | 1931 | 1948 | 7606 | 7623 | SEQ ID | TGTCCTGCTGGCTTCCGC | 1.52 |
| 2193 | 2193 | | | | | | 3821 | | |
| SEQ ID | COMP ID | CAGCGGAAGCCAGCAGGA | 1933 | 1950 | 7608 | 7625 | SEQ ID | TCCTGCTGGCTTCCGCTG | 1.84 |
| 2194 | 2194 | | | | | | 3822 | | |
| SEQ ID | COMP ID | CGCAGCGGAAGCCAGCAG | 1935 | 1952 | 7610 | 7627 | SEQ ID | CTGCTGGCTTCCGCTGCG | 1.59 |
| 2195 | 2195 | | | | | | 3823 | | |
| SEQ ID | COMP ID | TGCGCAGCGGAAGCCAGC | 1937 | 1954 | 7612 | 7629 | SEQ ID | GCTGGCTTCCGCTGCGCA | 2.07 |
| 2196 | 2196 | | | | | | 3824 | | |
| SEQ ID | COMP ID | GCTGCGCAGCGGAAGCCA | 1939 | 1956 | 7614 | 7631 | SEQ ID | TGGCTTCCGCTGCGCAGC | 1.6 |
| 2197 | 2197 | | | | | | 3825 | | |
| SEQ ID | COMP ID | TGGCTGCGCAGCGGAAGC | 1941 | 1958 | 7616 | 7633 | SEQ ID | GCTTCCGCTGCGCAGCCA | 1.6 |
| 2198 | 2198 | | | | | | 3826 | | |
| SEQ ID | COMP ID | CCTGGCTGCGCAGCGGAA | 1943 | 1960 | 7618 | 7635 | SEQ ID | TTCCGCTGCGCAGCCAGG | 1.74 |
| 2199 | 2199 | | | | | | 3827 | | |
| SEQ ID | COMP ID | CCCCTGGCTGCGCAGCGG | 1945 | 1962 | 7620 | 7637 | SEQ ID | CCGCTGCGCAGCCAGGGG | 1.63 |
| 2200 | 2200 | | | | | | 3828 | | |
| SEQ ID | COMP ID | TACCCCTGGCTGCGCAGC | 1947 | 1964 | 7622 | 7639 | SEQ ID | GCTGCGCAGCCAGGGGTA | 1.39 |
| 2201 | 2201 | | | | | | 3829 | | |
| SEQ ID | COMP ID | GGTACCCCTGGCTGCGCA | 1949 | 1966 | 7624 | 7641 | SEQ ID | TGCGCAGCCAGGGGTACC | 2.25 |
| 2202 | 2202 | | | | | | 3830 | | |
| SEQ ID | COMP ID | TTGGTACCCCTGGCTGCG | 1951 | 1968 | 7626 | 7643 | SEQ ID | CGCAGCCAGGGGTACCAA | 2.09 |
| 2203 | 2203 | | | | | | 3831 | | |
| SEQ ID | COMP ID | ACTTGGTACCCCTGGCTG | 1953 | 1970 | 7628 | 7645 | SEQ ID | CAGCCAGGGGTACCAAGT | 1.69 |
| 2204 | 2204 | | | | | | 3832 | | |
| SEQ ID | COMP ID | ACACTTGGTACCCCTGGC | 1955 | 1972 | 7630 | 7647 | SEQ ID | GCCAGGGGTACCAAGTGT | 1.39 |
| 2205 | 2205 | | | | | | 3833 | | |
| SEQ ID | COMP ID | AAACACTTGGTACCCCTG | 1957 | 1974 | 7632 | 7649 | SEQ ID | CAGGGGTACCAAGTGTTT | 1.63 |
| 2206 | 2206 | | | | | | 3834 | | |
| SEQ ID | COMP ID | GCAAACACTTGGTACCCC | 1959 | 1976 | 7634 | 7651 | SEQ ID | GGGGTACCAAGTGTTTGC | 1.44 |
| 2207 | 2207 | | | | | | 3835 | | |
| SEQ ID | COMP ID | GCGCAAACACTTGGTACC | 1961 | 1978 | 7636 | 7653 | SEQ ID | GGTACCAAGTGTTTGCGC | 1.81 |
| 2208 | 2208 | | | | | | 3836 | | |
| SEQ ID | COMP ID | CTGCGCAAACACTTGGTA | 1963 | 1980 | 7638 | 7655 | SEQ ID | TACCAAGTGTTTGCGCAG | 2.34 |
| 2209 | 2209 | | | | | | 3837 | | |
| SEQ ID | COMP ID | CCCTGCGCAAACACTTGG | 1965 | 1982 | 7640 | 7657 | SEQ ID | CCAAGTGTTTGCGCAGGG | 1.63 |
| 2210 | 2210 | | | | | | 3838 | | |
| SEQ ID | COMP ID | CTCCCTGCGCAAACACTT | 1967 | 1984 | 7642 | 7659 | SEQ ID | AAGTGTTTGCGCAGGGAG | 1.61 |
| 2211 | 2211 | | | | | | 3839 | | |
| SEQ ID | COMP ID | GCCTCCCTGCGCAAACAC | 1969 | 1986 | 7644 | 7661 | SEQ ID | GTGTTTGCGCAGGGAGGC | 1.57 |
| 2212 | 2212 | | | | | | 3840 | | |
| SEQ ID | COMP ID | GGGCCTCCCTGCGCAAAC | 1971 | 1988 | 7646 | 7663 | SEQ ID | GTTTGCGCAGGGAGGCCC | 2.01 |
| 2213 | 2213 | | | | | | 3841 | | |
| SEQ ID | COMP ID | CGGGGCCTCCCTGCGCAA | 1973 | 1990 | 7648 | 7665 | SEQ ID | TTGCGCAGGGAGGCCCCG | 2.03 |
| 2214 | 2214 | | | | | | 3842 | | |
| SEQ ID | COMP ID | CGCGGGGCCTCCCTGCGC | 1975 | 1992 | 7650 | 7667 | SEQ ID | GCGCAGGGAGGCCCCGCG | 0.96 |
| 2215 | 2215 | | | | | | 3843 | | |
| SEQ ID | COMP ID | AGCGCGGGGCCTCCCTGC | 1977 | 1994 | 7652 | 7669 | SEQ ID | GCAGGGAGGCCCCGCGCT | 1.5 |
| 2216 | 2216 | | | | | | 3844 | | |
| SEQ ID | COMP ID | CCAGCGCGGGGCCTCCCT | 1979 | 1996 | 7654 | 7671 | SEQ ID | AGGGAGGCCCCGCGCTGG | no data |
| 2217 | 2217 | | | | | | 3845 | | |
| SEQ ID | COMP ID | TCCCAGCGCGGGGCCTCC | 1981 | 1998 | 7656 | 7673 | SEQ ID | GGAGGCCCCGCGCTGGGA | no data |
| 2218 | 2218 | | | | | | 3846 | | |
| SEQ ID | COMP ID | CGTCCCAGCGCGGGGCCT | 1983 | 2000 | 7658 | 7675 | SEQ ID | AGGCCCCGCGCTGGGACG | no data |
| 2219 | 2219 | | | | | | 3847 | | |
| SEQ ID | COMP ID | GGCGTCCCAGCGCGGGGC | 1985 | 2002 | 7660 | 7677 | SEQ ID | GCCCCGCGCTGGGACGCC | 1.39 |
| 2220 | 2220 | | | | | | 3848 | | |
| SEQ ID | COMP ID | GGGGCGTCCCAGCGCGGG | 1987 | 2004 | 7662 | 7679 | SEQ ID | CCCGCGCTGGGACGCCCC | no data |
| 2221 | 2221 | | | | | | 3849 | | |
| SEQ ID | COMP ID | AAGGGGCGTCCCAGCGCG | 1989 | 2006 | 7664 | 7681 | SEQ ID | CGCGCTGGGACGCCCCTT | 1.86 |
| 2222 | 2222 | | | | | | 3850 | | |
| SEQ ID | COMP ID | CAAAGGGGCGTCCCAGCG | 1991 | 2008 | 7666 | 7683 | SEQ ID | CGCTGGGACGCCCCTTTG | 1.34 |
| 2223 | 2223 | | | | | | 3851 | | |
| SEQ ID | COMP ID | CTCAAAGGGGCGTCCCAG | 1993 | 2010 | 7668 | 7685 | SEQ ID | CTGGGACGCCCCTTTGAG | 1.51 |
| 2224 | 2224 | | | | | | 3852 | | |
| SEQ ID | COMP ID | CCCTCAAAGGGGCGTCCC | 1995 | 2012 | 7670 | 7687 | SEQ ID | GGGACGCCCCTTTGAGGG | 1.36 |
| 2225 | 2225 | | | | | | 3853 | | |
| SEQ ID | COMP ID | GTCCCTCAAAGGGGCGTC | 1997 | 2014 | 7672 | 7689 | SEQ ID | GACGCCCCTTTGAGGGAC | no data |
| 2226 | 2226 | | | | | | 3854 | | |
| SEQ ID | COMP ID | GGGTCCCTCAAAGGGGCG | 1999 | 2016 | 7674 | 7691 | SEQ ID | CGCCCCTTTGAGGGACCC | no data |
| 2227 | 2227 | | | | | | 3855 | | |
| SEQ ID | COMP ID | CTGGGTCCCTCAAAGGGG | 2001 | 2018 | 7676 | 7693 | SEQ ID | CCCCTTTGAGGGACCCAG | no data |
| 2228 | 2228 | | | | | | 3856 | | |
| SEQ ID | COMP ID | GGCTGGGTCCCTCAAAGG | 2003 | 2020 | 7678 | 7695 | SEQ ID | CCTTTGAGGGACCCAGCC | no data |
| 2229 | 2229 | | | | | | 3857 | | |
| SEQ ID | COMP ID | AAGGCTGGGTCCCTCAAA | 2005 | 2022 | 7680 | 7697 | SEQ ID | TTTGAGGGACCCAGCCTT | no data |
| 2230 | 2230 | | | | | | 3858 | | |
| SEQ ID | COMP ID | TCAAGGCTGGGTCCCTCA | 2007 | 2024 | 7682 | 7699 | SEQ ID | TGAGGGACCCAGCCTTGA | no data |
| 2231 | 2231 | | | | | | 3859 | | |
| SEQ ID | COMP ID | TCTCAAGGCTGGGTCCCT | 2009 | 2026 | 7684 | 7701 | SEQ ID | AGGGACCCAGCCTTGAGA | no data |
| 2232 | 2232 | | | | | | 3860 | | |
| SEQ ID | COMP ID | TGTCTCAAGGCTGGGTCC | 2011 | 2028 | 7686 | 7703 | SEQ ID | GGACCCAGCCTTGAGACA | no data |
| 2233 | 2233 | | | | | | 3861 | | |
| SEQ ID | COMP ID | GCTGTCTCAAGGCTGGGT | 2013 | 2030 | 7688 | 7705 | SEQ ID | ACCCAGCCTTGAGACAGC | no data |
| 2234 | 2234 | | | | | | 3862 | | |
| SEQ ID | COMP ID | CAGCTGTCTCAAGGCTGG | 2015 | 2032 | 7690 | 7707 | SEQ ID | CCAGCCTTGAGACAGCTG | no data |
| 2235 | 2235 | | | | | | 3863 | | |
| SEQ ID | COMP ID | AGCAGCTGTCTCAAGGCT | 2017 | 2034 | 7692 | 7709 | SEQ ID | AGCCTTGAGACAGCTGCT | no data |
| 2236 | 2236 | | | | | | 3864 | | |
| SEQ ID | COMP ID | ACAGCAGCTGTCTCAAGG | 2019 | 2036 | 7694 | 7711 | SEQ ID | CCTTGAGACAGCTGCTGT | no data |
| 2237 | 2237 | | | | | | 3865 | | |
| SEQ ID | COMP ID | TCACAGCAGCTGTCTCAA | 2021 | 2038 | 7696 | 7713 | SEQ ID | TTGAGACAGCTGCTGTGA | no data |
| 2238 | 2238 | | | | | | 3866 | | |
| SEQ ID | COMP ID | GCCTGCGTCCGACTCCGC | 234 | 251 | | | SEQ ID | GCGGAGTCGGACGCAGGC | 1.58 |
| 2239 | 2239 | | | | | | 3867 | | |
| SEQ ID | COMP ID | CTGCCTGCGTCCGACTCC | 236 | 253 | | | SEQ ID | GGAGTCGGACGCAGGCAG | 1.56 |
| 2240 | 2240 | | | | | | 3868 | | |
| SEQ ID | COMP ID | GTCTGCCTGCGTCCGACT | 238 | 255 | | | SEQ ID | AGTCGGACGCAGGCAGAC | 1.39 |
| 2241 | 2241 | | | | | | 3869 | | |
| SEQ ID | COMP ID | TGGTCTGCCTGCGTCCGA | 240 | 257 | | | SEQ ID | TCGGACGCAGGCAGACCA | 1.74 |
| 2242 | 2242 | | | | | | 3870 | | |
| SEQ ID | COMP ID | CATGGTCTGCCTGCGTCC | 242 | 259 | | | SEQ ID | GGACGCAGGCAGACCATG | 1.89 |
| 2243 | 2243 | | | | | | 3871 | | |
| SEQ ID | COMP ID | CACATGGTCTGCCTGCGT | 244 | 261 | | | SEQ ID | ACGCAGGCAGACCATGTG | 1.91 |
| 2244 | 2244 | | | | | | 3872 | | |
| SEQ ID | COMP ID | TCCAGAAGGGGACGGCAG | 379 | 396 | | | SEQ ID | CTGCCGTCCCCTTCTGGA | 1.82 |
| 2245 | 2245 | | | | | | 3873 | | |
| SEQ ID | COMP ID | TGTCCAGAAGGGGACGGC | 381 | 398 | | | SEQ ID | GCCGTCCCCTTCTGGACA | 1.57 |
| 2246 | 2246 | | | | | | 3874 | | |
| SEQ ID | COMP ID | TTTGTCCAGAAGGGGACG | 383 | 400 | | | SEQ ID | CGTCCCCTTCTGGACAAA | 1.55 |
| 2247 | 2247 | | | | | | 3875 | | |
| SEQ ID | COMP ID | CATTTGTCCAGAAGGGGA | 385 | 402 | | | SEQ ID | TCCCCTTCTGGACAAATG | 2.73 |
| 2248 | 2248 | | | | | | 3876 | | |
| SEQ ID | COMP ID | GCCATTTGTCCAGAAGGG | 387 | 404 | | | SEQ ID | CCCTTCTGGACAAATGGC | 1.49 |
| 2249 | 2249 | | | | | | 3877 | | |
| SEQ ID | COMP ID | GGGCCATTTGTCCAGAAG | 389 | 406 | | | SEQ ID | CTTCTGGACAAATGGCCC | 1.37 |
| 2250 | 2250 | | | | | | 3878 | | |
| SEQ ID | COMP ID | GTGGGCCATTTGTCCAGA | 391 | 408 | | | SEQ ID | TCTGGACAAATGGCCCAC | 1.51 |
| 2251 | 2251 | | | | | | 3879 | | |
| SEQ ID | COMP ID | TTGTGGGCCATTTGTCCA | 393 | 410 | | | SEQ ID | TGGACAAATGGCCCACAA | 1.59 |
| 2252 | 2252 | | | | | | 3880 | | |
| SEQ ID | COMP ID | GGCCTCTGGGAAGGGGCA | 506 | 523 | | | SEQ ID | TGCCCCTTCCCAGAGGCC | 2.34 |
| 2253 | 2253 | | | | | | 3881 | | |
| SEQ ID | COMP ID | ACGGCCTCTGGGAAGGGG | 508 | 525 | | | SEQ ID | CCCCTTCCCAGAGGCCGT | 3.92 |
| 2254 | 2254 | | | | | | 3882 | | |
| SEQ ID | COMP ID | CCACGGCCTCTGGGAAGG | 510 | 527 | | | SEQ ID | CCTTCCCAGAGGCCGTGG | 1.88 |
| 2255 | 2255 | | | | | | 3883 | | |
| SEQ ID | COMP ID | TGCCACGGCCTCTGGGAA | 512 | 529 | | | SEQ ID | TTCCCAGAGGCCGTGGCA | 2.05 |
| 2256 | 2256 | | | | | | 3884 | | |
| SEQ ID | COMP ID | CATGCCACGGCCTCTGGG | 514 | 531 | | | SEQ ID | CCCAGAGGCCGTGGCATG | 2.05 |
| 2257 | 2257 | | | | | | 3885 | | |
| SEQ ID | COMP ID | CGCATGCCACGGCCTCTG | 516 | 533 | | | SEQ ID | CAGAGGCCGTGGCATGCG | 2.33 |
| 2258 | 2258 | | | | | | 3886 | | |
| SEQ ID | COMP ID | CCCGCATGCCACGGCCTC | 518 | 535 | | | SEQ ID | GAGGCCGTGGCATGCGGG | 2.29 |
| 2259 | 2259 | | | | | | 3887 | | |
| SEQ ID | COMP ID | TTACCTGATCTTTGGAAG | 592 | 609 | | | SEQ ID | CTTCCAAAGATCAGGTAA | 1.69 |
| 2260 | 2260 | | | | | | 3888 | | |
| SEQ ID | COMP ID | TGTTACCTGATCTTTGGA | 594 | 611 | | | SEQ ID | TCCAAAGATCAGGTAACA | 1.76 |
| 2261 | 2261 | | | | | | 3889 | | |
| SEQ ID | COMP ID | GTTGTTACCTGATCTTTG | 596 | 613 | | | SEQ ID | CAAAGATCAGGTAACAAC | 2.04 |
| 2262 | 2262 | | | | | | 3890 | | |
| SEQ ID | COMP ID | GAGTTGTTACCTGATCTT | 598 | 615 | | | SEQ ID | AAGATCAGGTAACAACTC | 1.93 |
| 2263 | 2263 | | | | | | 3891 | | |
| SEQ ID | COMP ID | CGGAGTTGTTACCTGATC | 600 | 617 | | | SEQ ID | GATCAGGTAACAACTCCG | 1.6 |
| 2264 | 2264 | | | | | | 3892 | | |
| SEQ ID | COMP ID | CACGGAGTTGTTACCTGA | 602 | 619 | | | SEQ ID | TCAGGTAACAACTCCGTG | 1.88 |
| 2265 | 2265 | | | | | | 3893 | | |
| SEQ ID | COMP ID | AGCCTGGGGCATGGGGCA | 704 | 721 | | | SEQ ID | TGCCCCATGCCCCAGGCT | 3.73 |
| 2266 | 2266 | | | | | | 3894 | | |
| SEQ ID | COMP ID | GAAGCCTGGGGCATGGGG | 706 | 723 | | | SEQ ID | CCCCATGCCCCAGGCTTC | 4.09 |
| 2267 | 2267 | | | | | | 3895 | | |
| SEQ ID | COMP ID | AGGAAGCCTGGGGCATGG | 708 | 725 | | | SEQ ID | CCATGCCCCAGGCTTCCT | 1.56 |
| 2268 | 2268 | | | | | | 3896 | | |
| SEQ ID | COMP ID | GCAGGAAGCCTGGGGCAT | 710 | 727 | | | SEQ ID | ATGCCCCAGGCTTCCTGC | 1.61 |
| 2269 | 2269 | | | | | | 3897 | | |
| SEQ ID | COMP ID | CAGCAGGAAGCCTGGGGC | 712 | 729 | | | SEQ ID | GCCCCAGGCTTCCTGCTG | 1.41 |
| 2270 | 2270 | | | | | | 3898 | | |
| SEQ ID | COMP ID | CACAGCAGGAAGCCTGGG | 714 | 731 | | | SEQ ID | CCCAGGCTTCCTGCTGTG | 1.21 |
| 2271 | 2271 | | | | | | 3899 | | |
| SEQ ID | COMP ID | ACTGCCCTGTTAGTCCTC | 838 | 855 | | | SEQ ID | GAGGACTAACAGGGCAGT | 1.29 |
| 2272 | 2272 | | | | | | 3900 | | |
| SEQ ID | COMP ID | CCACTGCCCTGTTAGTCC | 840 | 857 | | | SEQ ID | GGACTAACAGGGCAGTGG | 1.12 |
| 2273 | 2273 | | | | | | 3901 | | |
| SEQ ID | COMP ID | GGCCACTGCCCTGTTAGT | 842 | 859 | | | SEQ ID | ACTAACAGGGCAGTGGCC | 1.46 |
| 2274 | 2274 | | | | | | 3902 | | |
| SEQ ID | COMP ID | AAGGCCACTGCCCTGTTA | 844 | 861 | | | SEQ ID | TAACAGGGCAGTGGCCTT | 1.37 |
| 2275 | 2275 | | | | | | 3903 | | |
| SEQ ID | COMP ID | ACAAGGCCACTGCCCTGT | 846 | 863 | | | SEQ ID | ACAGGGCAGTGGCCTTGT | 1.19 |
| 2276 | 2276 | | | | | | 3904 | | |
| SEQ ID | COMP ID | GGACAAGGCCACTGCCCT | 848 | 865 | | | SEQ ID | AGGGCAGTGGCCTTGTCC | 1.48 |
| 2277 | 2277 | | | | | | 3905 | | |
| SEQ ID | COMP ID | CTGGACAAGGCCACTGCC | 850 | 867 | | | SEQ ID | GGCAGTGGCCTTGTCCAG | 1.48 |
| 2278 | 2278 | | | | | | 3906 | | |
| SEQ ID | COMP ID | GCGTTGGGCATTGGGCAG | 949 | 966 | | | SEQ ID | CTGCCCAATGCCCAACGC | 1.39 |
| 2279 | 2279 | | | | | | 3907 | | |
| SEQ ID | COMP ID | TGGCGTTGGGCATTGGGC | 951 | 968 | | | SEQ ID | GCCCAATGCCCAACGCCA | 2.29 |
| 2280 | 2280 | | | | | | 3908 | | |
| SEQ ID | COMP ID | GGTGGCGTTGGGCATTGG | 953 | 970 | | | SEQ ID | CCAATGCCCAACGCCACC | 1.54 |
| 2281 | 2281 | | | | | | 3909 | | |
| SEQ ID | COMP ID | CAGGTGGCGTTGGGCATT | 955 | 972 | | | SEQ ID | AATGCCCAACGCCACCTG | 1.69 |
| 2282 | 2282 | | | | | | 3910 | | |
| SEQ ID | COMP ID | AGCAGGTGGCGTTGGGCA | 957 | 974 | | | SEQ ID | TGCCCAACGCCACCTGCT | 1.53 |
| 2283 | 2283 | | | | | | 3911 | | |
| SEQ ID | COMP ID | GCAGCAGGTGGCGTTGGG | 959 | 976 | | | SEQ ID | CCCAACGCCACCTGCTGC | 1.85 |
| 2284 | 2284 | | | | | | 3912 | | |
| SEQ ID | COMP ID | GAGCAGCAGGTGGCGTTG | 961 | 978 | | | SEQ ID | CAACGCCACCTGCTGCTC | 1.64 |
| 2285 | 2285 | | | | | | 3913 | | |
| SEQ ID | COMP ID | CGGAGCAGCAGGTGGCGT | 963 | 980 | | | SEQ ID | ACGCCACCTGCTGCTCCG | 1.15 |
| 2286 | 2286 | | | | | | 3914 | | |
| SEQ ID | COMP ID | ACTGTGTGCGCAGGCAGC | 1075 | 1092 | | | SEQ ID | GCTGCCTGCGCACACAGT | 1.15 |
| 2287 | 2287 | | | | | | 3915 | | |
| SEQ ID | COMP ID | CCACTGTGTGCGCAGGCA | 1077 | 1094 | | | SEQ ID | TGCCTGCGCACACAGTGG | 1.33 |
| 2288 | 2288 | | | | | | 3916 | | |
| SEQ ID | COMP ID | CCCCACTGTGTGCGCAGG | 1079 | 1096 | | | SEQ ID | CCTGCGCACACAGTGGGG | 1.19 |
| 2289 | 2289 | | | | | | 3917 | | |
| SEQ ID | COMP ID | TCCCCCACTGTGTGCGCA | 1081 | 1098 | | | SEQ ID | TGCGCACACAGTGGGGGA | 1.41 |
| 2290 | 2290 | | | | | | 3918 | | |
| SEQ ID | COMP ID | CATCCCCCACTGTGTGCG | 1083 | 1100 | | | SEQ ID | CGCACACAGTGGGGGATG | 1.25 |
| 2291 | 2291 | | | | | | 3919 | | |
| SEQ ID | COMP ID | CACATCCCCCACTGTGTG | 1085 | 1102 | | | SEQ ID | CACACAGTGGGGGATGTG | 1.15 |
| 2292 | 2292 | | | | | | 3920 | | |
| SEQ ID | COMP ID | GCCTGGGTAAAAGGGCAG | 1174 | 1191 | | | SEQ ID | CTGCCCTTTTACCCAGGC | 1.3 |
| 2293 | 2293 | | | | | | 3921 | | |
| SEQ ID | COMP ID | CAGCCTGGGTAAAAGGGC | 1176 | 1193 | | | SEQ ID | GCCCTTTTACCCAGGCTG | 1.73 |
| 2294 | 2294 | | | | | | 3922 | | |
| SEQ ID | COMP ID | CACAGCCTGGGTAAAAGG | 1178 | 1195 | | | SEQ ID | CCTTTTACCCAGGCTGTG | 1.74 |
| 2295 | 2295 | | | | | | 3923 | | |
| SEQ ID | COMP ID | CACACAGCCTGGGTAAAA | 1180 | 1197 | | | SEQ ID | TTTTACCCAGGCTGTGTG | 1.19 |
| 2296 | 2296 | | | | | | 3924 | | |
| SEQ ID | COMP ID | AGCACACAGCCTGGGTAA | 1182 | 1199 | | | SEQ ID | TTACCCAGGCTGTGTGCT | 1.16 |
| 2297 | 2297 | | | | | | 3925 | | |
| SEQ ID | COMP ID | ACAGCACACAGCCTGGGT | 1184 | 1201 | | | SEQ ID | ACCCAGGCTGTGTGCTGT | 1.18 |
| 2298 | 2298 | | | | | | 3926 | | |
| SEQ ID | COMP ID | TCACAGCACACAGCCTGG | 1186 | 1203 | | | SEQ ID | CCAGGCTGTGTGCTGTGA | 1.12 |
| 2299 | 2299 | | | | | | 3927 | | |
| SEQ ID | COMP ID | GCCTCTGGGATTGGACAG | 1420 | 1437 | | | SEQ ID | CTGTCCAATCCCAGAGGC | 1.49 |
| 2300 | 2300 | | | | | | 3928 | | |
| SEQ ID | COMP ID | CAGCCTCTGGGATTGGAC | 1422 | 1439 | | | SEQ ID | GTCCAATCCCAGAGGCTG | 1.24 |
| 2301 | 2301 | | | | | | 3929 | | |
| SEQ ID | COMP ID | GACAGCCTCTGGGATTGG | 1424 | 1441 | | | SEQ ID | CCAATCCCAGAGGCTGTC | 1.69 |
| 2302 | 2302 | | | | | | 3930 | | |
| SEQ ID | COMP ID | CAGACAGCCTCTGGGATT | 1426 | 1443 | | | SEQ ID | AATCCCAGAGGCTGTCTG | 1.27 |
| 2303 | 2303 | | | | | | 3931 | | |
| SEQ ID | COMP ID | AGCAGACAGCCTCTGGGA | 1428 | 1445 | | | SEQ ID | TCCCAGAGGCTGTCTGCT | 1.21 |
| 2304 | 2304 | | | | | | 3932 | | |
| SEQ ID | COMP ID | GCAGCAGACAGCCTCTGG | 1430 | 1447 | | | SEQ ID | CCAGAGGCTGTCTGCTGC | 1.19 |
| 2305 | 2305 | | | | | | 3933 | | |
| SEQ ID | COMP ID | GAGCAGCAGACAGCCTCT | 1432 | 1449 | | | SEQ ID | AGAGGCTGTCTGCTGCTC | 1.33 |
| 2306 | 2306 | | | | | | 3934 | | |
| SEQ ID | COMP ID | GCATGGGGCAACTGGCAG | 1654 | 1671 | | | SEQ ID | CTGCCAGTTGCCCCATGC | 1.73 |
| 2307 | 2307 | | | | | | 3935 | | |
| SEQ ID | COMP ID | CAGCATGGGGCAACTGGC | 1656 | 1673 | | | SEQ ID | GCCAGTTGCCCCATGCTG | 2.47 |
| 2308 | 2308 | | | | | | 3936 | | |
| SEQ ID | COMP ID | CACAGCATGGGGCAACTG | 1658 | 1675 | | | SEQ ID | CAGTTGCCCCATGCTGTG | 2.03 |
| 2309 | 2309 | | | | | | 3937 | | |
| SEQ ID | COMP ID | CACACAGCATGGGGCAAC | 1660 | 1677 | | | SEQ ID | GTTGCCCCATGTGTGTG | 1.74 |
| 2310 | 2310 | | | | | | 3938 | | |
| SEQ ID | COMP ID | AGCACACAGCATGGGGCA | 1662 | 1679 | | | SEQ ID | TGCCCCATGCTGTGTGCT | 2.02 |
| 2311 | 2311 | | | | | | 3939 | | |
| SEQ ID | COMP ID | GCAGCACACAGCATGGGG | 1664 | 1681 | | | SEQ ID | CCCCATGCTGTGTGCTGC | 2.29 |
| 2312 | 2312 | | | | | | 3940 | | |
| SEQ ID | COMP ID | TCGCAGCACACAGCATGG | 1666 | 1683 | | | SEQ ID | CCATGCTGTGTGCTGCGA | 1.4 |
| 2313 | 2313 | | | | | | 3941 | | |
| SEQ ID | COMP ID | CCTCGCAGCACACAGCAT | 1668 | 1685 | | | SEQ ID | ATGCTGTGTGCTGCGAGG | 1.31 |
| 2314 | 2314 | | | | | | 3942 | | |
| SEQ ID | COMP ID | CCCTGGCGGTAGGGACAG | 1885 | 1902 | | | SEQ ID | CTGTCCCTACCGCCAGGG | 1.34 |
| 2315 | 2315 | | | | | | 3943 | | |
| SEQ ID | COMP ID | CGCCCTGGCGGTAGGGAC | 1887 | 1904 | | | SEQ ID | GTCCCTACCGCCAGGGCG | 1.56 |
| 2316 | 2316 | | | | | | 3944 | | |
| SEQ ID | COMP ID | GACGCCCTGGCGGTAGGG | 1889 | 1906 | | | SEQ ID | CCCTACCGCCAGGGCGTC | 4.23 |
| 2317 | 2317 | | | | | | 3945 | | |
| SEQ ID | COMP ID | CAGACGCCCTGGCGGTAG | 1891 | 1908 | | | SEQ ID | CTACCGCCAGGGCGTCTG | 3.09 |
| 2318 | 2318 | | | | | | 3946 | | |
| SEQ ID | COMP ID | AACAGACGCCCTGGCGGT | 1893 | 1910 | | | SEQ ID | ACCGCCAGGGCGTCTGTT | 1.85 |
| 2319 | 2319 | | | | | | 3947 | | |
| SEQ ID | COMP ID | ACAACAGACGCCCTGGCG | 1895 | 1912 | | | SEQ ID | CGCCAGGGCGTCTGTTGT | 1.61 |
| 2320 | 2320 | | | | | | 3948 | | |

Compound Table

| SEQ ID | HELM, 5′-3′ direction |
|---|---|
| SEQ ID 3 | [LR]([5meC])[sP] · [dR](C)[sP] · [dR](T)[sP] · [LR](G)[sP] · [dR](C)[sP] · |
| | [dR](T)[sP] · [LR](T)[sP] · [dR](C)[sP] · [dR](C)[sP] · [LR](T)[sP] · [dR](C)[sP] · |
| | [LR](T)[sP] · [dR]([5meC])[sP] · [dR](G)[sP] · [LR]([5meC])[sP] · [LR]([5meC] |
| SEQ ID 4 | [LR]([5meC])[sP] · [dR](C)[sP] · [LR]([5meC])[sP] · [dR](T)[sP] · [LR](G)[sP] · |
| | [dR](C)[sP] · [dR](T)[sP] · [LR](T)[sP] · [dR](C)[sP] · [dR](C)[sP] · [LR](T)[sP] · |
| | [dR](C)[sP] · [LR](T)[sP] · [dR](C)[sP] · [LR](G)[sP] · [LR]([5meC] |
| SEQ ID 5 | [LR](T)[sP] · [dR](C)[sP] · [LR]([5meC])[sP] · [dR](C)[sP] · [dR](T)[sP] · |
| | [LR](G)[sP] · [dR](C)[sP] · [dR](T)[sP] · [LR](T)[sP] · [dR](C)[sP] · [dR](C)[sP] · |
| | [LR](T)[sP] · [dR](C)[sP] · [dR](T)[sP] · [LR]([5meC])[sP] · [LR](G) |
| SEQ ID 6 | [LR]([5meC])[sP] · [dR](T)[sP] · [dR](C)[sP] · [LR]([5meC])[sP] · [dR](C)[sP] · |
| | [dR](T)[sP] · [LR](G)[sP] · [dR](C)[sP] · [dR](T)[sP] · [LR](T)[sP] · |
| | [dR](C)[sP] · [dR](C)[sP] · [LR](T)[sP] · [dR](C)[sP] · [LR](T)[sP] · [LR]([5meC] |
| SEQ ID 7 | [LR]([5meC])[sP] · [dR](C)[sP] · [LR](T)[sP] · [dR](C)[sP] · [LR]([5meC])[sP] · |
| | [dR](C)[sP] · [dR](T)[sP] · [LR](G)[sP] · [dR](C)[sP] · [dR](T)[sP] · [LR](T)[sP] · |
| | [dR](C)[sP] · [LR]([5meC])[sP] · [dR](T)[sP] · [LR]([5meC])[sP] · [LR](T) |
| SEQ ID 8 | [LR](T)[sP] · [dR](C)[sP] · [dR](C)[sP] · [LR](T)[sP] · [dR](C)[sP] · [LR]([5meC])[sP] · |
| | [dR](C)[sP] · [dR](T)[sP] · [LR](G)[sP] · [dR](C)[sP] · [dR](T)[sP] · |
| | [LR](T)[sP] · [dR](C)[sP] · [dR](C)[sP] · [LR](T)[sP] · [LR]([5meC] |
| SEQ ID 9 | [LR]([5meC])[sP] · [dR](C)[sP] · [LR](T)[sP] · [dR](C)[sP] · [LR]([5meC])[sP] · |
| | [dR](C)[sP] · [dR](T)[sP] · [LR](G)[sP] · [dR](C)[sP] · [dR](T)[sP] · [LR](G)[sP] · |
| | [dR](C)[sP] · [dR](T)[sP] · [LR](T)[sP] · [dR](C)[sP] · [LR]([5meC])[sP] · [LR](T) |
| SEQ ID 10 | [LR](T)[sP] · [dR](C)[sP] · [LR](T)[sP] · [dR](C)[sP] · [dR](C)[sP] · [LR](T)[sP] · |
| | [dR](C)[sP] · [LR]([5meC])[sP] · [dR](C)[sP] · [dR](T)[sP] · [LR](G)[sP] · |
| | [dR](C)[sP] · [LR](T)[sP] · [dR](T)[sP] · [LR]([5meC])[sP] · [LR]([5meC] |
| SEQ ID 11 | [LR]([5meC])[sP] · [dR](T)[sP] · [dR](C)[sP] · [LR](T)[sP] · [dR](C)[sP] · |
| | [dR](C)[sP] · [LR](T)[sP] · [dR](C)[sP] · [LR]([5meC])[sP] · [dR](C)[sP] · |
| | [dR](T)[sP] · [LR](G)[sP] · [dR](C)[sP] · [dR](T)[sP] · [LR](T)[sP] · [LR]([5meC] |
| SEQ ID 12 | [LR](A)[sP] · [dR](C)[sP] · [LR](T)[sP] · [dR](C)[sP] · [LR](T)[sP] · [dR](C)[sP] · |
| | [dR](C)[sP] · [LR](T)[sP] · [dR](C)[sP] · [LR]([5meC])[sP] · [dR](C)[sP] · |
| | [dR](T)[sP] · [LR](G)[sP] · [dR](C)[sP] · [LR](T)[sP] · [LR](T) |
| SEQ ID 13 | [LR]([5meC])[sP] · [dR](A)[sP] · [dR](C)[sP] · [LR](T)[sP] · [dR](C)[sP] · |
| | [LR](T)[sP] · [dR](C)[sP] · [dR](C)[sP] · [LR](T)[sP] · [dR](C)[sP] · [dR](C)[sP] · |
| | [LR]([5meC])[sP] · [dR](T)[sP] · [dR](G)[sP] · [LR]([5meC])[sP] · [LR](T) |
| SEQ ID 14 | [LR](T)[sP] · [dR](C)[sP] · [LR](A)[sP] · [dR](C)[sP] · [LR](T)[sP] · [dR](C)[sP] · |
| | [LR](T)[sP] · [dR](C)[sP] · [dR](C)[sP] · [LR](T)[sP] · [dR](C)[sP] · |
| | [LR]([5meC])[sP] · [dR](C)[sP] · [dR](T)[sP] · [LR](G)[sP] · [LR]([5meC] |
| SEQ ID 15 | [LR](A)[sP] · [dR](T)[sP] · [dR](C)[sP] · [LR](A)[sP] · [dR](C)[sP] · [LR](T)[sP] · |
| | [dR](C)[sP] · [dR](T)[sP] · [LR]([5meC])[sP] · [dR](C)[sP] · [dR](T)[sP] · |
| | [LR]([5meC])[sP] · [dR](C)[sP] · [dR](C)[sP] · [LR](T)[sP] · [LR](G) |
| SEQ ID 16 | [LR](A)[sP] · [dR](A)[sP] · [LR](T)[sP] · [dR](C)[sP] · [LR](A)[sP] · [dR](C)[sP] · |
| | [LR](T)[sP] · [dR](C)[sP] · [LR](T)[sP] · [dR](C)[sP] · [dR](C)[sP] · |
| | [LR](T)[sP] · [dR](C)[sP] · [dR](C)[sP] · [LR]([5meC])[sP] · [LR](T) |
| SEQ ID 17 | [LR](A)[sP] · [dR](A)[sP] · [LR](A)[sP] · [dR](T)[sP] · [dR](C)[sP] · [LR](A)[sP] · |
| | [dR](C)[sP] · [LR](T)[sP] · [dR](C)[sP] · [LR](T)[sP] · [dR](C)[sP] · |
| | [dR](C)[sP] · [LR](T)[sP] · [dR](C)[sP] · [LR]([5meC])[sP] · [LR]([5meC] |
| SEQ ID 18 | [LR]([5meC])[sP] · [dR](A)[sP] · [dR](A)[sP] · [LR](A)[sP] · [dR](T)[sP] · |
| | [dR](C)[sP] · [LR](A)[sP] · [dR](C)[sP] · [LR](T)[sP] · [dR](C)[sP] · [dR](T)[sP] · |
| | [LR]([5meC])[sP] · [dR](C)[sP] · [dR](T)[sP] · [LR]([5meC])[sP] · [LR]([5meC] |
| SEQ ID 19 | [LR](T)[sP] · [dR](C)[sP] · [LR](A)[sP] · [dR](A)[sP] · [LR](A)[sP] · [dR](T)[sP] · |
| | [dR](C)[sP] · [LR](A)[sP] · [dR](C)[sP] · [LR](T)[sP] · [dR](C)[sP] · |
| | [LR](T)[sP] · [dR](C)[sP] · [dR](C)[sP] · [LR](T)[sP] · [LR]([5meC] |
| SEQ ID 20 | [LR]([5meC])[sP] · [dR](T)[sP] · [dR](C)[sP] · [LR](A)[sP] · [dR](A)[sP] · |
| | [LR](A)[sP] · [dR](T)[sP] · [dR](C)[sP] · [LR](A)[sP] · [dR](C)[sP] · [dR](T)[sP] · |
| | [LR]([5meC])[sP] · [dR](T)[sP] · [dR](C)[sP] · [LR]([5meC])[sP] · [LR](T) |
| SEQ ID 21 | [LR](A)[sP] · [dR](C)[sP] · [LR](T)[sP] · [dR](C)[sP] · [LR](A)[sP] · [dR](A)[sP] · |
| | [LR](A)[sP] · [dR](T)[sP] · [dR](C)[sP] · [LR](A)[sP] · [dR](C)[sP] · |
| | [LR](T)[sP] · [dR](C)[sP] · [dR](T)[sP] · [LR([5meC])[sP] · [LR]([5meC] |
| SEQ ID 22 | [LR](T)[sP] · [dR](A)[sP] · [dR](C)[sP] · [LR](T)[sP] · [dR](C)[sP] · [LR](A)[sP] · |
| | [dR](A)[sP] · [LR](A)[sP] · [dR](T)[sP] · [dR](C)[sP] · [LR](A)[sP] · |
| | [dR](C)[sP] · [LR](T)[sP] · [dR](C)[sP] · [dR](T)[sP] · [LR]([5meC] |
| SEQ ID 23 | [LR]([5meC])[sP] · [dR](T)[sP] · [LR](A)[sP] · [dR](C)[sP] · [LR](T)[sP] · |
| | [dR](C)[sP] · [LR](A)[sP] · [dR](A)[sP] · [LR](A)[sP] · [dR](T)[sP] · [dR](C)[sP] · |
| | [LR](A)[sP] · [dR](C)[sP] · [dR](T)[sP] · [LR]([5meC])[sP] · [LR](T) |
| SEQ ID 24 | [LR](T)[sP] · [dR](C)[sP] · [dR](T)[sP] · [LR](A)[sP] · [dR](C)[sP] · [LR](T)[sP] · |
| | [dR](C)[sP] · [LR](A)[sP] · [dR](A)[sP] · [dR](A)[sP] · [LR](T)[sP] · |
| | [dR](C)[sP] · [LR](A)[sP] · [dR](C)[sP] · [LR](T)[sP] · [LR]([5meC] |
| SEQ ID 25 | [LR](T)[sP] · [dR](T)[sP] · [dR](C)[sP] · [LR](T)[sP] · [dR](A)[sP] · [dR](C)[sP] · |
| | [LR](T)[sP] · [dR](C)[sP] · [LR](A)[sP] · [dR](A)[sP] · [dR](A)[sP] · |
| | [LR](T)[sP] · [dR](C)[sP] · [dR](A)[sP] · [LR]([5meC])[sP] · [LR](T) |
| SEQ ID 26 | [LR](T)[sP] · [dR](T)[sP] · [LR](T)[sP] · [dR](C)[sP] · [dR](T)[sP] · [LR](A)[sP] · |
| | [dR](C)[sP] · [LR](T)[sP] · [LR]([5meC])[sP] · [dR](A)[sP] · [LR](A)[sP] · |
| | [dR](A)[sP] · [LR](T)[sP] · [dR](C)[sP] · [LR](A)[sP] · [LR]([5meC] |
| SEQ ID 27 | [LR](T)[sP] · [dR](T)[sP] · [LR](T)[sP] · [dR](T)[sP] · [dR](C)[sP] · [LR](T)[sP] · |
| | [dR](A)[sP] · [dR](C)[sP] · [LR](T)[sP] · [dR](C)[sP] · [LR](A)[sP] · |
| | [dR](A)[sP] · [LR](A)[sP] · [dR](T)[sP] · [LR]([5meC])[sP] · [LR](A) |
| SEQ ID 28 | [LR]([5meC])[sP] · [dR](T)[sP] · [LR](T)[sP] · [dR](T)[sP] · [dR](T)[sP] · |
| | [LR]([5meC])[sP] · [dR](T)[sP] · [LR](A)[sP] · [dR](C)[sP] · [LR](T)[sP] · |
| | [dR](C)[sP] · [LR](A)[sP] · [dR](A)[sP] · [dR](A)[sP] · [LR](T)[sP] · [LR]([5meC] |
| SEQ ID 29 | [LR](T)[sP] · [dR](C)[sP] · [LR](T)[sP] · [LR](T)[sP] · [dR](T)[sP] · [LR](T)[sP] · |
| | [dR](C)[sP] · [dR](T)[sP] · [LR](A)[sP] · [dR](C)[sP] · [dR](T)[sP] · |
| | [LR]([5meC])[sP] · [dR](A)[sP] · [dR](A)[sP] · [LR](A)[sP] · [LR](T) |
| SEQ ID 30 | [LR](T)[sP] · [dR](T)[sP] · [dR](C)[sP] · [LR](T)[sP] · [LR](T)[sP] · [dR](T)[sP] · |
| | [dR](T)[sP] · [LR]([5meC])[sP] · [dR](T)[sP] · [LR](A)[sP] · [dR](C)[sP] · |
| | [dR](T)[sP] · [LR]([5meC])[sP] · [dR](A)[sP] · [LR](A)[sP] · [LR](A) |
| SEQ ID 31 | [LR](T)[sP] · [dR](T)[sP] · [LR](T)[sP] · [dR](C)[sP] · [dR](T)[sP] · [LR](T)[sP] · |
| | [dR](T)[sP] · [LR](T)[sP] · [dR](C)[sP] · [dR](T)[sP] · [LR](A)[sP] · [LR]([5meC])[sP] · |
| | [dR](T)[sP] · [dR](C)[sP] · [LR](A)[sP] · [LR](A) |
| SEQ ID 32 | [LR](G)[sP] · [dR](T)[sP] · [dR](T)[sP] · [LR](T)[sP] · [dR](C)[sP] · [dR](T)[sP] · |
| | [LR](T)[sP] · [dR](T)[sP] · [LR](T)[sP] · [dR](C)[sP] · [dR](T)[sP] · [LR](A)[sP] · |
| | [dR](C)[sP] · [dR](T)[sP] · [LR]([5meC])[sP] · [LR](A) |
| SEQ ID 33 | [LR](T)[sP] · [dR](G)[sP] · [dR](T)[sP] · [LR](T)[sP] · [dR](T)[sP] · [dR](C)[sP] · |
| | [LR](T)[sP] · [dR](T)[sP] · [dR](T)[sP] · [LR](T)[sP] · [dR](C)[sP] · [dR(T)[sP] · |
| | [LR](A)[sP] · [dR](C)[sP] · [LR](T)[sP] · [LR]([5meC] |
| SEQ ID 34 | [LR](G)[sP] · [dR](T)[sP] · [LR](G)[sP] · [dR](T)[sP] · [dR](T)[sP] · [LR](T)[sP] · |
| | [dR](C)[sP] · [dR](T)[sP] · [LR](T)[sP] · [dR](T)[sP] · [LR](T)[sP] · |
| | [dR](C)[sP] · [dR](T)[sP] · [LR](A)[sP] · [LR]([5meC])[sP] · [LR](T) |
| SEQ ID 35 | [LR](T)[sP] · [dR](G)[sP] · [dR](T)[sP] · [LR](G)[sP] · [dR](T)[sP] · [dR](T)[sP] · |
| | [LR](T)[sP] · [dR](C)[sP] · [dR](T)[sP] · [LR](T)[sP] · [dR](T)[sP] · |
| | [LR](T)[sP] · [dR](C)[sP] · [dR](T)[sP] · [LR](A)[sP] · [LR]([5meC] |
| SEQ ID 36 | [LR]([5meC])[sP] · [dR](T)[sP] · [LR](G)[sP] · [dR](T)[sP] · [LR](G)[sP] · |
| | [dR](T)[sP] · [dR](T)[sP] · [LR](T)[sP] · [dR](C)[sP] · [dR](T)[sP] · [LR](T)[sP] · |
| | [dR](T)[sP] · [LR](T)[sP] · [dR](C)[sP] · [LR](T)[sP] · [LR](A) |
| SEQ ID 37 | [LR](G)[sP] · [dR](C)[sP] · [dR](T)[sP] · [LR](G)[sP] · [dR](T)[sP] · |
| | [LR](G)[sP] · [dR](T)[sP] · [dR](T)[sP] · [LR](T)[sP] · [dR](C)[sP] · [dR](T)[sP] · |
| | [LR](T)[sP] · [dR](T)[sP] · [dR](T)[sP] · [LR]([5meC])[sP] · [LR](T) |
| SEQ ID 38 | [LR](T)[sP] · [dR](G)[sP] · [dR](C)[sP] · [LR](T)[sP] · [dR](G)[sP] · [dR](T)[sP] · |
| | [LR](G)[sP] · [dR](T)[sP] · [dR](T)[sP] · [LR](T)[sP] · [dR](C)[sP] · |
| | [dR](T)[sP] · [LR](T)[sP] · [dR](T)[sP] · [LR](T)[sP] · [LR]([5meC] |
| SEQ ID 39 | [LR](A)[sP] · [dR](T)[sP] · [LR](G)[sP] · [dR](C)[sP] · [dR](T)[sP] · [LR](G)[sP] · |
| | [dR](T)[sP] · [LR](G)[sP] · [dR](T)[sP] · [LR](T)[sP] · [dR](T)[sP] · |
| | [dR](C)[sP] · [LR](T)[sP] · [dR](T)[sP] · [LR](T)[sP] · [LR](T) |
| SEQ ID 40 | [LR](A)[sP] · [dR](A)[sP] · [dR](T)[sP] · [LR](G)[sP] · [dR](C)[sP] · [dR](T)[sP] · |
| | [LR](G)[sP] · [dR](T)[sP] · [LR](G)[sP] · [dR](T)[sP] · [dR](T)[sP] · |
| | [LR](T)[sP] · [dR](C)[sP] · [dR](T)[sP] · [LR](T)[sP] · [LR](T) |
| SEQ ID 41 | [LR](G)[sP] · [dR](A)[sP] · [LR](A)[sP] · [dR](T)[sP] · [LR](G)[sP] · [dR](C)[sP] · |
| | [dR](T)[sP] · [LR](G)[sP] · [dR](T)[sP] · [LR](G)[sP] · [dR](T)[sP] · |
| | [LR](T)[sP] · [dR](T)[sP] · [dR](C)[sP] · [LR](T)[sP] · [LR](T) |
| SEQ ID 42 | [LR](G)[sP] · [dR](G)[sP] · [dR](A)[sP] · [LR](A)[sP] · [dR](T)[sP] · [LR](G)[sP] · |
| | [dR](C)[sP] · [dR](T)[sP] · [LR](G)[sP] · [dR](T)[sP] · [LR](G)[sP] · |
| | [dR](T)[sP] · [LR](T)[sP] · [dR](T)[sP] · [LR]([5meC])[sP] · [LR](T) |
| SEQ ID 43 | [LR](T)[sP] · [dR](G)[sP] · [dR](G)[sP] · [LR](A)[sP] · [dR](A)[sP] · [dR](T)[sP] · |
| | [LR](G)[sP] · [dR](C)[sP] · [dR](T)[sP] · [LR](G)[sP] · [dR](T)[sP] · |
| | [LR](G)[sP] · [dR](T)[sP] · [dR](T)[sP] · [LR](T)[sP] · [LR]([5meC] |
| SEQ ID 44 | [LR]([5meC])[sP] · [dR](T)[sP] · [dR](G)[sP] · [LR](G)[sP] · [dR](A)[sP] · |
| | [LR](A)[sP] · [dR](T)[sP] · [LR](G)[sP] · [dR](C)[sP] · [dR](T)[sP] · [LR](G)[sP] · |
| | [dR](T)[sP] · [LR](G)[sP] · [dR](T)[sP] · [LR](T)[sP] · [LR](T) |
| SEQ ID 45 | [LR]([5meC])[sP] · [dR](C)[sP] · [dR](T)[sP] · [LR](G)[sP] · [dR](G)[sP] · |
| | [dR](A)[sP] · [LR](A)[sP] · [dR](T)[sP] · [LR](G)[sP] · [dR](C)[sP] · [dR](T)[sP] · |
| | [LR](G)[sP] · [dR](T)[sP] · [dR](G)[sP] · [LR](T)[sP] · [LR](T) |
| SEQ ID 46 | [LR](G)[sP] · [dR](C)[sP] · [dR](C)[sP] · [LR](T)[sP] · [dR](G)[sP] · |
| | [dR](G)[sP] · [LR](A)[sP] · [dR](A)[sP] · [dR](T)[sP] · [LR](G)[sP] · [dR](C)[sP] · |
| | [dR](T)[sP] · [LR](G)[sP] · [dR](T)[sP] · [LR](G)[sP] · [LR](T) |
| SEQ ID 47 | [LR](A)[sP] · [dR](G)[sP] · [dR](C)[sP] · [LR]([5meC])[sP] · [dR](T)[sP] · |
| | [dR](G)[sP] · [LR](G)[sP] · [dR](A)[sP] · [LR](A)[sP] · [dR](T)[sP] · [dR](G)[sP] · |
| | [LR]([5meC])[sP] · [dR](T)[sP] · [dR](G)[sP] · [LR](T)[sP] · [LR](G) |
| SEQ ID 48 | [LR]([5meC])[sP] · [dR](A)[sP] · [dR](G)[sP] · [LR]([5meC])[sP] · [dR](C)[sP] · |
| | [dR](T)[sP] · [LR](G)[sP] · [dR](G)[sP] · [dR](A)[sP] · [LR](A)[sP] · |
| | [dR](T)[sP] · [LR](G)[sP] · [dR](C)[sP] · [dR](T)[sP] · [LR](G)[sP] · [LR](T) |
| SEQ ID 49 | [LR]([5meC])[sP] · [dR](C)[sP] · [dR](A)[sP] · [LR](G)[sP] · [dR](C)[sP] · |
| | [dR](C)[sP] · [LR](T)[sP] · [dR](G)[P] · [dR](G)[sP] · [LR](A)[sP] · [dR](A)[sP] · |
| | [dR](T)[sP] · [LR](G)[sP] · [dR](C)[sP] · [LR](T)[sP] · [LR](G) |
| SEQ ID 50 | [LR](G)[sP] · [dR](C)[sP] · [dR](C)[sP] · [LR](A)[sP] · [dR](G)[sP] · [dR](C)[sP] · |
| | [LR]([5meC])[sP] · [dR](T)[sP] · [dR](G)[sP] · [LR](G)[sP] · [dR](A)[sP] · |
| | [LR](A)[sP] · [dR](T)[sP] · [dR](G)[sP] · [LR]([5meC])[sP] · [LR](T) |
| SEQ ID 51 | [LR](G)[sP] · [dR](G)[sP] · [dR](C)[sP] · [LR]([5meC])[sP] · [dR](A)[sP] · |
| | [dR](G)[sP] · [LR]([5meC])[sP] · [dR](C)[sP] · [dR](T)[sP] · [LR](G)[sP] · |
| | [dR](G)[sP] · [dR](A)[sP] · [LR](A)[sP] · [dR](T)[sP] · [LR](G)[sP] · [LR]([5meC] |
| SEQ ID 52 | [LR](G)[sP] · [dR](G)[sP] · [LR](G)[sP] · [dR](C)[sP] · [dR](C)[sP] · [LR](A)[sP] · |
| | [dR](G)[sP] · [dR](C)[sP] · [LR]([5meC])[sP] · [dR](T)[sP] · [dR](G)[sP] · |
| | [LR](G)[sP] · [dR](A)[sP] · [dR](A)[sP] · [LR](T)[sP] · [LR](G) |
| SEQ ID 53 | [LR](G)[sP] · [dR](G)[sP] · [dR](G)[sP] · [LR](G)[sP] · [dR](C)[sP] · [dR](C)[sP] · |
| | [LR](A)[sP] · [dR](G)[sP] · [dR](C)[sP] · [LR]([5meC])[sP] · [dR](T)[sP] · |
| | [dR](G)[sP] · [LR](G)[sP] · [dR](A)[sP] · [LR](A)[sP] · [LR](T) |
| SEQ ID 54 | [LR](T)[sP] · [dR](G)[sP] · [dR](G)[sP] · [LR](G)[sP] · [dR](G)[P] · [dR](C)[sP] · |
| | [LR]([5meC])[sP] · [dR](A)[sP] · [dR](G)[sP] · [LR]([5meC])[sP] · |
| | [dR](C)[sP] · [dR](T)[sP] · [LR](G)[sP] · [dR](G)[sP] · [LR](A)[sP] · [LR](A) |
| SEQ ID 55 | [LR](G)[sP] · [dR](T)[sP] · [LR](G)[sP] · [dR](G)[sP] · [dR](G)[sP] · [LR](G)[sP] · |
| | [dR](C)[sP] · [dR](C)[sP] · [LR](A)[sP] · [dR](G)[sP] · [dR](C)[sP] · |
| | [LR]([5meC])[sP] · [dR](T)[sP] · [dR](G)[sP] · [LR](G)[sP] · [LR](A) |
| SEQ ID 56 | [LR](G)[sP] · [dR](G)[sP] · [dR](T)[sP] · [LR](G)[sP] · [dR](G)[sP] · [dR](G)[sP] · |
| | [LR](G)[sP] · [dR](C)[sP] · [dR](C)[sP] · [LR](A)[sP] · [dR](G)[sP] · |
| | [dR](C)[sP] · [LR]([5meC])[sP] · [dR](T)[sP] · [LR](G)[sP] · [LR](G) |
| SEQ ID 57 | [LR](A)[sP] · [dR](G)[sP] · [dR](G)[sP] · [LR](T)[sP] · [dR](G)[sP] · [dR](G)[sP] · |
| | [LR](G)[sP] · [dR](G)[sP] · [dR](C)[sP] · [LR]([5meC])[sP] · [dR](A)[sP] · |
| | [LR](G)[sP] · [dR](C)[sP] · [dR](C)[sP] · [LR](T)[sP] · [LR](G) |
| SEQ ID 58 | [LR](G)[sP] · [dR](A)[sP] · [dR](G)[sP] · [LR](G)[sP] · [dR](T)[sP] · [LR](G)[sP] · |
| | [dR](G)[sP] · [dR](G)[sP] · [LR](G)[sP] · [dR](C)[sP] · [dR](C)[sP] · |
| | [LR](A)[sP] · [dR](G)[sP] · [dR](C)[sP] · [LR]([5meC])[sP] · [LR](T) |
| SEQ ID 59 | [LR](A)[sP] · [dR](G)[sP] · [dR](A)[sP] · [LR](G)[sP] · [dR](G)[sP] · [dR](T)[sP] · |
| | [LR](G)[sP] · [dR](G)[sP] · [dR](G)[sP] · [LR](G)[sP] · [dR](C)[sP] · |
| | [dR](C)[sP] · [LR](A)[sP] · [dR](G)[sP] · [LR]([5meC])[sP] · [LR]([5meC] |
| SEQ ID 60 | [LR](T)[sP] · [dR](A)[sP] · [LR](G)[sP] · [dR](A)[sP] · [dR](G)[sP] · [LR](G)[sP] · |
| | [dR](T)[sP] · [LR](G)[sP] · [dR](G)[sP] · [dR](G)[sP] · [LR](G)[sP] · |
| | [dR](C)[sP] · [LR]([5meC])[sP] · [dR](A)[sP] · [LR](G)[sP] · [LR]([5meC] |
| SEQ ID 61 | [LR](A)[sP] · [dR](T)[sP] · [dR](A)[sP] · [LR](G)[sP] · [dR](A)[sP] · [dR](G)[sP] · |
| | [LR](G)[sP] · [dR](T)[sP] · [LR](G)[sP] · [dR](G)[sP] · [dR](G)[sP] · |
| | [LR](G)[sP] · [dR](C)[sP] · [dR](C)[sP] · [LR](A)[sP] · [LR](G) |
| SEQ ID 62 | [LR](T)[sP] · [dR](A)[sP] · [dR](T)[sP] · [LR](A)[sP] · [dR](G)[sP] · [dR](A)[sP] · |
| | [LR](G)[sP] · [dR](G)[sP] · [dR](T)[sP] · [LR](G)[sP] · [dR](G)[sP] · |
| | [dR](G)[sP] · [LR](G)[sP] · [dR](C)[sP] · [LR]([5meC])[sP] · [LR](A) |
| SEQ ID 63 | [LR](A)[sP] · [dR](T)[sP] · [LR](A)[sP] · [dR](T)[sP] · [dR](A)[sP] · [LR](G)[sP] · |
| | [dR](A)[sP] · [dR](G)[sP] · [LR](G)[sP] · [dR](T)[sP] · [dR](G)[sP] · |
| | [LR](G)[sP] · [dR](G)[sP] · [dR](G)[sP] · [LR]([5meC])[sP] · [LR]([5meC] |
| SEQ ID 64 | [LR](A)[sP] · [dR](A)[sP] · [dR](T)[sP] · [LR](A)[sP] · [dR](T)[sP] · [dR](A)[sP] · |
| | [LR](G)[sP] · [dR](A)[sP] · [dR](G)[sP] · [LR](G)[sP] · [dR](T)[sP] · |
| | [LR](G)[sP] · [dR](G)[sP] · [dR](G)[sP] · [LR](G)[sP] · [LR]([5meC] |
| SEQ ID 65 | [LR]([5meC])[sP] · [dR](A)[sP] · [LR](A)[sP] · [dR](T)[sP] · [LR](A)[sP] · |
| | [dR](T)[sP] · [dR](A)[sP] · [LR](G)[sP] · [dR](A)[sP] · [dR](G)[sP] · [LR](G)[sP] · |
| | [dR](T)[sP] · [LR](G)[sP] · [dR](G)[sP] · [LR](G)[sP] · [LR](G) |
| SEQ ID 66 | [LR](T)[sP] · [dR](C)[sP] · [LR](A)[sP] · [dR](A)[sP] · [dR](T)[sP] · [LR](A)[sP] · |
| | [dR](T)[sP] · [dR](A)[sP] · [LR](G)[sP] · [dR](A)[sP] · [dR](G)[sP] · |
| | [LR](G)[sP] · [dR](T)[sP] · [dR](G)[sP] · [LR](G)[sP] · [LR](G) |
| SEQ ID 67 | [LR](A)[sP] · [dR](T)[sP] · [dR](C)[sP] · [LR](A)[sP] · [dR](A)[sP] · [dR](T)[sP] · |
| | [LR](A)[sP] · [dR](T)[sP] · [dR](A)[sP] · [LR](G)[sP] · [dR](A)[sP] · |
| | [dR](G)[sP] · [LR](G)[sP] · [dR](T)[sP] · [LR](G)[sP] · [LR](G) |
| SEQ ID 68 | [LR](T)[sP] · [dR](A)[sP] · [LR](T)[sP] · [dR](C)[sP] · [dR](A)[sP] · [LR](A)[sP] · |
| | [dR](T)[sP] · [LR](A)[sP] · [dR](T)[sP] · [LR](A)[sP] · [dR](G)[sP] · |
| | [LR](A)[sP] · [dR](G)[sP] · [dR](G)[sP] · [LR](T)[sP] · [LR](G) |
| SEQ ID 69 | [LR](T)[sP] · [dR](T)[sP] · [dR](A)[sP] · [LR](T)[sP] · [dR](C)[sP] · [LR](A)[sP] · |
| | [LR](A)[sP] · [dR](T)[sP] · [dR](A)[sP] · [LR](T)[sP] · [dR](A)[sP] · |
| | [LR](G)[sP] · [dR](A)[sP] · [dR](G)[sP] · [LR](G)[sP] · [LR](T) |
| SEQ ID 70 | [LR]([5meC])[sP] · [LR](T)[sP] · [dR](T)[sP] · [LR](A)[sP] · [dR](T)[sP] · |
| | [dR](C)[sP] · [LR](A)[sP] · [dR](A)[sP] · [dR](T)[sP] · [LR](A)[sP] · [dR](T)[sP] · |
| | [dR](A)[sP] · [LR](G)[sP] · [dR](A)[sP] · [LR](G)[sP] · [LR](G) |
| SEQ ID 71 | [LR](A)[sP] · [LR]([5meC])[sP] · [dR](T)[sP] · [dR](T)[sP] · [LR](A)[sP] · |
| | [dR](T)[sP] · [dR](C)[sP] · [LR](A)[sP] · [LR](A)[sP] · [dR](T)[sP] · [LR](A)[sP] · |
| | [dR](T)[sP] · [dR](A)[sP] · [LR](G)[sP] · [LR](A)[sP] · [LR](G) |
| SEQ ID 72 | [LR](T)[sP] · [dR](A)[sP] · [dR](C)[sP] · [LR](T)[sP] · [dR](T)[sP] · |
| | [LR](A)[sP] · [LR](T)[sP] · [dR](C)[sP] · [LR](A)[sP] · [dR](A)[sP] · [dR](T)[sP] · |
| | [LR](A)[sP] · [LR](T)[sP] · [dR](A)[sP] · [LR](G)[sP] · [LR](A) |
| SEQ ID 73 | [LR]([5meC])[sP] · [LR](T)[sP] · [LR](A)[P] · [dR](C)[sP] · [LR](T)[sP] · |
| | [dR](T)[sP] · [dR](A)[sP] · [LR](T)[sP] · [dR](C)[sP] · [LR](A)[sP] · [dR](A)[sP] · |
| | [dR](T)[sP] · [LR](A)[sP] · [dR](T)[sP] · [LR](A)[sP] · [LR](G) |
| SEQ ID 74 | [LR](G)[sP] · [dR](C)[sP] · [dR](T)[sP] · [LR](A)[sP] · [dR](C)[sP] · [dR](T)[sP] · |
| | [LR](T)[sP] · [dR](A)[sP] · [LR](T)[sP] · [dR](C)[sP] · [LR](A)[sP] · |
| | [dR](A)[sP] · [LR](T)[sP] · [dR](A)[sP] · [LR](T)[sP] · [LR](A) |
| SEQ ID 75 | [LR](G)[sP] · [dR](G)[sP] · [dR](C)[sP] · [LR](T)[sP] · [dR](A)[sP] · [dR](C)[sP] · |
| | [LR](T)[sP] · [dR](T)[sP] · [LR](A)[sP] · [dR](T)[sP] · [dR](C)[sP] · |
| | [LR](A)[sP] · [dR](A)[sP] · [dR](T)[sP] · [LR](A)[sP] · [LR](T) |
| SEQ ID 76 | [LR](T)[sP] · [dR](G)[sP] · [LR](G)[sP] · [dR](C)[sP] · [dR](T)[sP] · [LR](A)[sP] · |
| | [dR](C)[sP] · [LR](T)[sP] · [dR](T)[sP] · [LR](A)[sP] · [dR](T)[sP] · |
| | [dR](C)[sP] · [LR](A)[sP] · [dR](A)[sP] · [LR](T)[sP] · [LR](A) |
| SEQ ID 77 | [LR](T)[sP] · [dR](T)[sP] · [dR](G)[sP] · [LR](G)[sP] · [dR](C)[sP] · [dR](T)[sP] · |
| | [LR](A)[sP] · [dR](C)[sP] · [LR](T)[sP] · [dR](T)[sP] · [LR](A)[sP] · |
| | [dR](T)[sP] · [dR](C)[sP] · [dR](A)[sP] · [LR](A)[sP] · [LR](T) |
| SEQ ID 78 | [LR](A)[sP] · [dR](T)[sP] · [dR](T)[sP] · [LR](G)[sP] · [dR](G)[sP] · [dR](C)[sP] · |
| | [LR](T)[sP] · [dR](A)[sP] · [dR](C)[sP] · [LR](T)[sP] · [dR](T)[sP] · |
| | [LR](A)[sP] · [dR](T)[sP] · [dR](C)[sP] · [LR](A)[sP] · [LR](A) |
| SEQ ID 79 | [LR]([5meC])[sP] · [dR](A)[sP] · [LR](T)[sP] · [dR](T)[sP] · [dR](G)[P] · |
| | [LR](G)[sP] · [dR](C)[sP] · [dR](T)[sP] · [LR](A)[sP] · [dR](C)[sP] · [LR](T)[sP] · |
| | [dR](T)[sP] · [LR](A)[sP] · [dR](T)[sP] · [LR]([5meC])[sP] · [LR](A) |
| SEQ ID 80 | [LR]([5meC])[sP] · [dR](C)[sP] · [dR](A)[sP] · [LR](T)[sP] · [dR](T)[sP] · |
| | [dR](G)[sP] · [LR](G)[sP] · [dR](C)[sP] · [dR](T)[sP] · [LR](A)[sP] · [dR](C)[sP] · |
| | [LR](T)[sP] · [dR](T)[sP] · [dR](A)[sP] · [LR](T)[sP] · [LR]([5meC] |
| SEQ ID 81 | [LR]([5meC])[sP] · [dR](C)[sP] · [dR](C)[sP] · [LR](A)[sP] · [dR](T)[sP] · |
| | [dR](T)[sP] · [LR](G)[sP] · [dR](G)[sP] · [dR](C)[sP] · [LR](T)[sP] · [dR](A)[sP] · |
| | [dR](C)[sP] · [LR](T)[sP] · [dR](T)[sP] · [LR](A)[sP] · [LR](T) |
| SEQ ID 82 | [LR](T)[sP] · [dR](C)[sP] · [dR](C)[sP] · [LR]([5meC])[sP] · [dR](A)[sP] · |
| | [LR](T)[sP] · [dR](T)[sP] · [dR](G)[sP] · [LR](G)[sP] · [dR](C)[sP] · [dR](T)[sP] · |
| | [LR](A)[sP] · [dR](C)[sP] · [dR](T)[sP] · [LR](T)[sP] · [LR](A) |
| SEQ ID 83 | [LR]([5meC])[sP] · [dR](T)[sP] · [dR](C)[sP] · [LR]([5meC])[sP] · [dR](C)[sP] · |
| | [dR](A)[sP] · [LR](T)[sP] · [dR](T)[sP] · [dR](G)[sP] · [LR](G)[sP] · |
| | [dR](C)[sP] · [dR](T)[sP] · [LR](A)[sP] · [dR](C)[sP] · [LR](T)[sP] · [LR](T) |
| SEQ ID 84 | [LR](G)[sP] · [dR](C)[sP] · [dR](T)[sP] · [LR]([5meC])[sP] · [dR](C)[sP] · |
| | [dR](C)[sP] · [LR](A)[sP] · [dR](T)[sP] · [dR](T)[sP] · [LR](G)[sP] · [dR](G)[sP] · |
| | [dR](C)[sP] · [LR](T)[sP] · [dR](A)[sP] · [LR]([5meC])[sP] · [LR](T) |
| SEQ ID 85 | [LR]([5meC])[sP] · [dR](G)[sP] · [dR](C)[sP] · [LR](T)[sP] · [dR](C)[sP] · |
| | [dR](C)[sP] · [LR]([5meC])[sP] · [dR](A)[sP] · [LR](T)[sP] · [dR](T)[sP] · |
| | [dR](G)[sP] · [LR](G)[sP] · [dR](C)[sP] · [dR](T)[sP] · [LR](A)[sP] · [LR]([5meC] |
| SEQ ID 86 | [LR]([5meC])[sP] · [dR](C)[sP] · [LR](G)[sP] · [dR](C)[sP] · [dR](T)[sP] · |
| | [LR]([5meC])[sP] · [dR](C)[sP] · [dR](C)[sP] · [LR](A)[sP] · [dR](T)[sP] · |
| | [dR](T)[sP] · [LR](G)[sP] · [dR](G)[sP] · [dR](C)[sP] · [LR](T)[sP] · [LR](A) |
| SEQ ID 87 | [LR]([5meC])[sP] · [dR](C)[sP] · [dR](C)[sP] · [LR](G)[sP] · [dR](C)[sP] · |
| | [dR](T)[sP] · [LR]([5meC])[sP] · [dR](C)[sP] · [dR](C)[sP] · [LR](A)[sP] · |
| | [dR](T)[sP] · [LR](T)[sP] · [dR](G)[sP] · [dR](G)[sP] · [LR]([5meC]) · [LR](T) |
| SEQ ID 88 | [LR](A)[sP] · [dR](C)[sP] · [dR](C)[sP] · [LR]([5meC])[sP] · [dR](G)[sP] · |
| | [dR](C)[sP] · [LR](T)[sP] · [dR](C)[sP] · [dR](C)[sP] · [LR]([5meC])[sP] · |
| | [dR](A)[sP] · [LR](T)[sP] · [dR](T)[sP] · [dR](G)[sP] · [LR](G)[sP] · [LR]([5meC]) |
| SEQ ID 89 | [LR](T)[sP] · [dR](A)[sP] · [dR](C)[sP] · [LR]([5meC])[sP] · [dR](C)[sP] · |
| | [LR](G)[sP] · [dR](C)[sP] · [dR](T)[sP] · [LR]([5meC])[sP] · [dR](C)[sP] · |
| | [dR](C)[sP] · [LR](A)[sP] · [dR](T)[sP] · [dR](T)[sP] · [LR](G)[sP] · [LR](G) |
| SEQ ID 90 | [LR]([5meC])[sP] · [dR](T)[sP] · [dR](A)[sP] · [LR]([5meC])[sP] · |
| | [dR](C)[sP] · [dR](C)[sP] · [LR](G)[sP] · [dR](C)[sP] · [dR](T)[sP] · [LR]([5meC]) · |
| | [dR](C)[sP] · [dR](C)[sP] · [LR](A)[sP] · [dR](T)[sP] · [LR](T)[sP] · [LR](G) |
| SEQ ID 91 | [LR](G)[sP] · [dR](C)[sP] · [dR](T)[sP] · [LR](A)[sP] · [dR](C)[sP] · [dR](C)[sP] · |
| | [LR]([5meC])[sP] · [dR](G)[sP] · [dR](C)[sP] · [LR](T)[sP] · [dR](C)[sP] · |
| | [dR](C)[sP] · [LR]([5meC])[sP] · [dR](A)[sP] · [LR](T)[sP] · [LR](T) |
| SEQ ID 92 | [LR](G)[sP] · [dR](G)[sP] · [dR](C)[sP] · [LR](T)[sP] · [dR](A)[sP] · [dR](C)[sP] · |
| | [LR]([5meC])[sP] · [dR](C)[sP] · [LR](G)[sP] · [dR](C)[sP] · [dR](T)[sP] · |
| | [LR]([5meC])[sP] · [dR](C)[sP] · [dR](C)[sP] · [LR](A)[sP] · [LR](T) |
| SEQ ID 93 | [LR](G)[sP] · [dR](G)[sP] · [LR](G)[sP] · [dR](C)[sP] · [dR](T)[sP] · [LR](A)[sP] · |
| | [dR](C)[sP] · [dR](C)[sP] · [LR]([5meC])[sP] · [dR](G)[sP] · [dR](C)[sP] · |
| | [LR](T)[sP] · [dR](C)[sP] · [dR](C)[sP] · [LR]([5meC])[sP] · [LR](A) |
| SEQ ID 94 | [LR](A)[sP] · [dR](G)[sP] · [dR](G)[sP] · [LR](G)[sP] · [dR](C)[sP] · [dR](T)[sP] · |
| | [LR](A)[sP] · [dR](C)[sP] · [dR](C)[sP] · [LR]([5meC])[sP] · [dR](G)[sP] · |
| | [dR](C)[sP] · [LR](T)[sP] · [dR](C)[sP] · [LR]([5meC])[sP] · [LR]([5meC] |
| SEQ ID 95 | [LR]([5meC])[sP] · [dR](A)[sP] · [dR](G)[sP] · [LR](G)[sP] · [dR](G)[sP] · |
| | [dR](C)[sP] · [LR](T)[sP] · [dR](A)[sP] · [dR](C)[sP] · [LR]([5meC])[sP] · |
| | [dR](C)[sP] · [LR](G)[sP] · [dR](C)[sP] · [dR](T)[sP] · [LR]([5meC])[sP] · [LR]([5meC] |
| SEQ ID 96 | [LR](T)[sP] · [dR](C)[sP] · [LR](A)[sP] · [dR](G)[sP] · [dR](G)[sP] · [LR](G)[sP] · |
| | [dR](C)[sP] · [dR](T)[sP] · [LR](A)[sP] · [dR](C)[sP] · [dR](C)[sP] · |
| | [LR]([5meC])[sP] · [dR](G)[sP] · [dR](C)[sP] · [LR](T)[sP] · [LR]([5meC] |
| SEQ ID 97 | [LR](A)[sP] · [dR](T)[sP] · [dR](C)[sP] · [LR](A)[sP] · [dR](G)[sP] · [dR](G)[sP] · |
| | [LR](G)[sP] · [dR](C)[sP] · [dR](T)[sP] · [LR](A)[sP] · [dR](C)[sP] · |
| | [dR](C)[sP] · [LR]([5meC])[sP] · [dR](G)[sP] · [LR]([5meC])[sP] · [LR](T) |
| SEQ ID 98 | [LR](G)[sP] · [dR](A)[sP] · [LR](T)[sP] · [dR](C)[sP] · [LR](A)[sP] · [dR](G)[sP] · |
| | [dR](G)[sP] · [LR](G)[sP] · [dR](C)[sP] · [dR](T)[sP] · [LR](A)[sP] · |
| | [dR](C)[sP] · [LR]([5meC])[sP] · [dR](C)[sP] · [LR](G)[sP] · [LR]([5meC] |
| SEQ ID 99 | [LR](G)[sP] · [dR](G)[sP] · [LR](A)[sP] · [dR](T)[sP] · [dR](C)[sP] · [LR](A)[sP] · |
| | [dR](G)[sP] · [dR](G)[sP] · [LR](G)[sP] · [dR](C)[sP] · [dR](T)[sP] · |
| | [LR](A)[sP] · [dR](C)[sP] · [dR](C)[sP] · [LR]([5meC])[sP] · [LR](G) |
| SEQ ID 100 | [LR](G)[sP] · [dR](G)[sP] · [dR](G)[sP] · [LR](A)[sP] · [dR](T)[sP] · [dR](C)[sP] · |
| | [LR](A)[sP] · [dR](G)[sP] · [dR](G)[sP] · [LR](G)[sP] · [dR](C)[sP] · |
| | [dR](T)[sP] · [LR](A)[sP] · [dR](C)[sP] · [LR]([5meC])[sP] · [LR]([5meC] |
| SEQ ID 101 | [LR](A)[sP] · [dR](G)[sP] · [dR](G)[sP] · [LR](G)[sP] · [dR](A)[sP] · [LR](T)[sP] · |
| | [dR](C)[sP] · [LR](A)[sP] · [dR](G)[sP] · [dR](G)[sP] · [LR](G)[sP] · |
| | [dR](C)[sP] · [dR](T)[sP] · [LR](A)[sP] · [LR]([5meC])[sP] · [LR]([5meC] |
| SEQ ID 102 | [LR]([5meC])[sP] · [dR](A)[sP] · [LR](G)[sP] · [dR](G)[sP] · [dR](G)[sP] · |
| | [LR](A)[sP] · [dR](T)[sP] · [dR](C)[sP] · [LR](A)[sP] · [dR](G)[sP] · [dR](G)[sP] · |
| | [LR](G)[sP] · [dR](C)[sP] · [dR](T)[sP] · [LR](A)[sP] · [LR]([5meC] |
| SEQ ID 103 | [LR]([5meC])[sP] · [dR](C)[sP] · [LR](A)[sP] · [dR](G)[sP] · [dR](G)[sP] · |
| | [LR](G)[sP] · [dR](A)[sP] · [LR](T)[sP] · [dR](C)[sP] · [LR](A)[sP] · [dR](G)[sP] · |
| | [dR](G)[sP] · [LR](G)[sP] · [dR](C)[sP] · [LR](T)[sP] · [LR](A) |
| SEQ ID 104 | [LR](G)[sP] · [dR](C)[sP] · [dR](C)[sP] · [LR](A)[sP] · [dR](G)[sP] · [dR](G)[sP] · |
| | [LR](G)[sP] · [dR](A)[sP] · [LR](T)[sP] · [dR](C)[sP] · [dR](A)[sP] · |
| | [LR](G)[sP] · [dR](G)[sP] · [dR](G)[sP] · [LR]([5meC])[sP] · [LR](T) |
| SEQ ID 105 | [LR](G)[sP] · [dR](G)[sP] · [dR](C)[sP] · [LR]([5meC])[sP] · [dR](A)[sP] · |
| | [LR](G)[sP] · [dR](G)[sP] · [dR](G)[sP] · [LR](A)[sP] · [dR](T)[sP] · [dR](C)[sP] · |
| | [LR](A)[sP] · [dR](G)[sP] · [dR](G)[sP] · [LR](G)[sP] · [LR]([5meC] |
| SEQ ID 106 | [LR](T)[sP] · [dR](G)[sP] · [LR](G)[sP] · [dR](C)[sP] · [dR](C)[sP] · [LR](A)[sP] · |
| | [dR](G)[sP] · [dR](G)[sP] · [LR](G)[sP] · [dR](A)[sP] · [dR](T)[sP] · |
| | [LR]([5meC])[sP] · [dR](A)[sP] · [dR](G)[sP] · [LR](G)[sP] · [LR](G) |
| SEQ ID 107 | [LR](T)[sP] · [dR](T)[sP] · [dR](G)[sP] · [LR](G)[sP] · [dR](C)[sP] · [dR](C)[sP] · |
| | [LR](A)[sP] · [dR](G)[sP] · [dR](G)[sP] · [LR](G)[sP] · [dR](A)[sP] · |
| | [LR](T)[sP] · [dR](C)[sP] · [dR](A)[sP] · [LR](G)[sP] · [LR](G) |
| SEQ ID 108 | [LR](A)[sP] · [dR](T)[sP] · [dR](T)[sP] · [LR](G)[sP] · [dR](G)[sP] · [dR](C)[sP] · |
| | [LR]([5meC])[sP] · [dR](A)[sP] · [LR](G)[sP] · [dR](G)[sP] · [dR](G)[sP] · |
| | [LR](A)[sP] · [dR](T)[sP] · [dR](C)[sP] · [LR](A)[sP] · [LR](G) |
| SEQ ID 109 | [LR]([5meC])[sP] · [dR](A)[sP] · [LR](T)[sP] · [dR](T)[sP] · [dR](G)[sP] · |
| | [LR](G)[sP] · [dR](C)[sP] · [dR](C)[sP] · [LR](A)[sP] · [dR](G)[sP] · [dR](G)[sP] · |
| | [LR](G)[sP] · [dR](A)[sP] · [dR](T)[sP] · [LR]([5meC])[sP] · [LR](A) |
| SEQ ID 110 | [LR]([5meC])[sP] · [dR](C)[sP] · [dR](A)[sP] · [LR](T)[sP] · [dR](T)[sP] · |
| | [dR](G)[sP] · [LR](G)[sP] · [dR](C)[sP] · [dR](C)[sP] · [LR](A)[sP] · [dR](G)[sP] · |
| | [dR](G)[sP] · [LR](G)[sP] · [dR](A)[sP] · [LR](T)[sP] · [LR]([5meC] |
| SEQ ID 111 | [LR](T)[sP] · [dR](C)[sP] · [dR](C)[sP] · [LR](A)[sP] · [dR](T)[sP] · [dR](T)[sP] · |
| | [LR](G)[sP] · [dR](G)[sP] · [dR](C)[sP] · [LR]([5meC])[sP] · [dR](A)[sP] · |
| | [LR](G)[sP] · [dR](G)[sP] · [dR](G)[sP] · [LR](A)[sP] · [LR](T) |
| SEQ ID 112 | [LR](T)[sP] · [dR](T)[sP] · [dR](C)[sP] · [LR]([5meC])[sP] · [dR](A)[sP] · |
| | [LR](T)[sP] · [dR](T)[sP] · [dR](G)[sP] · [LR](G)[sP] · [dR](C)[sP] · [dR](C)[sP] · |
| | [LR](A)[sP] · [dR](G)[sP] · [dR](G)[sP] · [LR](A)[sP] · [LR](A) |
| SEQ ID 113 | [LR](T)[sP] · [dR](T)[sP] · [LR](T)[sP] · [dR](C)[sP] · [dR](C)[sP] · [LR](A)[sP] · |
| | [dR](T)[sP] · [dR](T)[sP] · [LR](G)[sP] · [dR](G)[sP] · [dR](C)[sP] |
| | [LR]([5meC])[sP] · [dR](A)[sP] · [dR](G)[sP] · [LR](G)[sP] · [LR](G) |
| SEQ ID 114 | [LR](G)[sP] · [dR](T)[sP] · [dR](T)[sP] · [LR](T)[sP] · [dR](C)[sP] · [dR](C)[sP] · |
| | [LR](A)[sP] · [dR](T)[sP] · [dR](T)[sP] · [LR](G)[sP] · [dR](G)[sP] · |
| | [dR](C)[sP] · [LR]([5meC])[sP] · [dR](A)[sP] · [LR](G)[sP] · [LR](G) |
| SEQ ID 115 | [LR](A)[sP] · [dR](G)[sP] · [dR](T)[sP] · [LR](T)[sP] · [dR](T)[sP] · [dR](C)[sP] · |
| | [LR]([5meC])[sP] · [dR](A)[sP] · [LR](T)[sP] · [dR](T)[sP] · [dR](G)[sP] · |
| | [LR](G)[sP] · [dR](C)[sP] · [dR](C)[sP] · [LR](A)[sP] · [LR](G) |
| SEQ ID 116 | [LR]([5meC])[sP] · [dR](A)[sP] · [dR](G)[sP] · [LR](T)[sP] · [dR](T)[sP] · |
| | [LR](T)[sP] · [dR](C)[sP] · [dR](C)[sP] · [LR](A)[sP] · [dR](T)[sP] · [dR](G)[sP] · |
| | [LR](G)[sP] · [dR](G)[sP] · [dR](C)[sP] · [LR]([5meC])[sP] · [LR](A |
| SEQ ID 117 | [LR](T)[sP] · [dR](C)[sP] · [dR](A)[sP] · [LR](G)[sP] · [dR](T)[sP] · [dR](T)[sP] · |
| | [LR](T)[sP] · [dR](C)[sP] · [dR](C)[sP] · [LR](A)[sP] · [dR](T)[sP] · |
| | [LR](T)[sP] · [dR](G)[sP] · [dR](G)[sP] · [LR]([5meC])[sP] · [LR]([5meC] |
| SEQ ID 118 | [LR]([5meC])[sP] · [dR](T)[sP] · [dR](C)[sP] · [LR](A)[sP] · [dR](G)[sP] · |
| | [dR](T)[sP] · [LR](T)[sP] · [dR](T)[sP] · [dR](C)[sP] · [LR]([5meC])[sP] · |
| | [dR](A)[sP] · [LR](T)[sP] · [dR](T)[sP] · [dR](G)[sP] · [LR](G)[sP] · [LR]([5meC] |
| SEQ ID 119 | [LR]([5meC])[sP] · [dR](C)[sP] · [dR](T)[sP] · [LR]([5meC])[sP] · [dR](A)[sP] · |
| | [dR](G)[sP] · [LR](T)[sP] · [dR](T)[sP] · [LR](T)[sP] · [dR](C)[sP] · |
| | [dR](C)[sP] · [LR](A)[sP] · [dR](T)[sP] · [dR](T)[sP] · [LR](G)[sP] · [LR](G) |
| SEQ ID 120 | [LR](A)[sP] · [dR](C)[sP] · [dR](C)[sP] · [LR](T)[sP] · [dR](C)[sP] · [dR](A)[sP] · |
| | [LR](G)[sP] · [dR](T)[sP] · [dR](T)[sP] · [LR](T)[sP] · [dR](C)[sP] · |
| | [dR](C)[sP] · [LR](A)[sP] · [dR](T)[sP] · [LR](T)[sP] · [LR](G) |
| SEQ ID 121 | [LR](T)[sP] · [dR](A)[sP] · [dR](C)[sP] · [LR]([5meC])[sP] · [dR](T)[sP] · |
| | [dR](C)[sP] · [LR](A)[sP] · [dR](G)[sP] · [dR](T)[sP] · [LR](T)[sP] · [dR](T)[sP] · |
| | [dR](C)[sP] · [LR]([5meC])[sP] · [dR](A)[sP] · [LR](T)[sP] · [LR](T) |
| SEQ ID 122 | [LR]([5meC])[sP] · [dR](T)[sP] · [LR](A)[sP] · [dR](C)[sP] · [dR](C)[sP] · |
| | [LR](T)[sP] · [dR](C)[sP] · [dR](A)[sP] · [LR](G)[sP] · [dR](T)[sP] · [dR](T)[sP] · |
| | [LR](T)[sP] · [dR](C)[sP] · [dR](C)[sP] · [LR](A)[sP] · [LR](T) |
| SEQ ID 123 | [LR]([5meC])[sP] · [dR](C)[sP] · [dR](T)[sP] · [LR](A)[sP] · [dR](C)[sP] · |
| | [dR](C)[sP] · [LR](T)[sP] · [dR](C)[sP] · [LR](A)[sP] · [dR](G)[sP] · [dR](T)[sP] · |
| | [LR](T)[sP] · [dR](T)[sP] · [dR](C)[sP] · [LR]([5meC])[sP] · [LR](A) |
| SEQ ID 124 | [LR](G)[sP] · [dR](C)[sP] · [LR]([5meC])[sP] · [dR](T)[sP] · [LR](A)[sP] · |
| | [dR](C)[sP] · [dR](C)[sP] · [LR](T)[sP] · [dR](C)[sP] · [LR](A)[sP] · [dR](G)[sP] · |
| | [dR](T)[sP] · [LR](T)[sP] · [dR](T)[sP] · [LR]([5meC])[sP] · [LR]([5meC] |
| SEQ ID 125 | [LR]([5meC])[sP] · [dR](G)[sP] · [dR](C)[sP] · [LR]([5meC])[sP] · [dR](T)[sP] · |
| | [LR](A)[sP] · [dR](C)[sP] · [dR](C)[sP] · [LR](T)[sP] · [dR](C)[sP] · [dR](A)[sP] · |
| | [dR](A)[sP] · [LR](G)[sP] · [dR](T)[sP] · [dR](T)[sP] · [LR](T)[sP] · [LR]([5meC] |
| SEQ ID 126 | [LR]([5meC])[sP] · [dR]([5meC])[sP] · [dR](G)[sP] · [LR]([5meC])[sP] · |
| | [dR](C)[sP] · [dR](T)[sP] · [LR](A)[sP] · [dR](C)[sP] · [dR](C)[sP] · [LR](T)[sP] · |
| | [dR](C)[sP] · [LR](A)[sP] · [dR](G)[sP] · [dR](T)[sP] · [LR](T)[sP] · [LR](T) |
| SEQ ID 127 | [LR]([5meC])[sP] · [dR](C)[sP] · [dR](C)[sP] · [LR](G)[sP] · [dR](C)[sP] · |
| | [LR]([5meC])[sP] · [dR](T)[sP] · [LR](A)[sP] · [dR](C)[sP] · [dR](C)[sP] · |
| | [LR](T)[sP] · [dR](C)[sP] · [LR](A)[sP] · [dR](G)[sP] · [LR](T)[sP] · [LR](T) |
| SEQ ID 128 | [LR](A)[sP] · [dR](C)[sP] · [dR](C)[sP] · [LR]([5meC])[sP] · [dR](G)[sP] · |
| | [dR](C)[sP] · [LR]([5meC])[sP] · [dR](T)[sP] · [LR](A)[sP] · [dR](C)[sP] · |
| | [dR](C)[sP] · [LR](T)[sP] · [dR](C)[sP] · [dR](A)[sP] · [LR](G)[sP] · [LR](T) |
| SEQ ID 129 | [LR](G)[sP] · [dR](A)[sP] · [dR](C)[sP] · [LR]([5meC])[sP] · [dR]([5meC])[sP] · |
| | [dR](G)[sP] · [LR]([5meC])[sP] · [dR](C)[sP] · [dR](T)[sP] · [LR](A)[sP] · |
| | [dR](C)[sP] · [dR](C)[sP] · [LR](T)[sP] · [dR](C)[sP] · [LR](A)[sP] · [LR](G) |
| SEQ ID 130 | [LR](T)[sP] · [dR](G)[sP] · [dR](A)[sP] · [LR]([5meC])[sP] · [dR](C)[sP] · [dR](C)[sP] · |
| | [LR](G)[sP] · [dR](C)[sP] · [LR]([5meC])[sP] · [dR](T)[sP] · [dR](A)[sP] · |
| | [LR]([5meC])[sP] · [dR](C)[sP] · [dR](T)[sP] · [LR]([5meC])[sP] · [LR](A) |
| SEQ ID 131 | [LR](A)[sP] · [dR](T)[sP] · [LR](G)[sP] · [dR](A)[sP] · [dR](C)[sP] · |
| | [LR]([5meC])[sP] · [dR]([5meC])[sP] · [dR](G)[sP] · [LR]([5meC])[sP] · [dR](C)[sP] · |
| | [dR](T)[sP] · [LR](A)[sP] · [dR](C)[sP] · [dR](C)[sP] · [LR](T)[sP] · [LR]([5meC] |
| SEQ ID 132 | [LR](G)[sP] · [dR](A)[sP] · [dR](T)[sP] · [LR](G)[sP] · [dR](A)[sP] · [dR](C)[sP] · |
| | [LR]([5meC])[sP] · [dR]([5meC])[sP] · [dR](G)[sP] · [LR]([5meC])[sP] · [dR](C)[sP] · |
| | [dR](T)[sP] · [LR](A)[sP] · [dR](C)[sP] · [LR]([5meC])[sP] · [LR](T) |
| SEQ ID 133 | [LR]([5meC])[sP] · [dR](G)[sP] · [LR](A)[sP] · [dR](T)[sP] · [LR](G)[sP] · |
| | [dR](A)[sP] · [dR](C)[sP] · [LR]([5meC])[sP] · [dR](C)[sP] · [LR](G)[sP] · [dR](C)[sP] · |
| | [LR]([5meC])[sP] · [dR](T)[sP] · [dR](A)[sP] · [LR]([5meC])[sP] · [LR]([5meC] |
| SEQ ID 134 | [LR](G)[sP] · [dR](C)[sP] · [LR](G)[sP] · [dR](A)[sP] · [dR](T)[sP] · [LR](G)[sP] · |
| | [dR](A)[sP] · [dR](C)[sP] · [LR]([5meC])[sP] · [dR]([5meC])[sP] · [dR](G)[sP] · |
| | [LR]([5meC])[sP] · [dR](C)[sP] · [dR](T)[sP] · [LR](A)[sP] · [LR]([5meC] |
| SEQ ID 135 | [LR]([5meC])[sP] · [dR](G)[sP] · [dR](C)[sP] · [LR](G)[sP] · [dR](A)[sP] · |
| | [dR](T)[sP] · [LR](G)[sP] · [dR](A)[sP] · [dR](C)[sP] · [LR]([5meC])[sP] · |
| | [dR](C)[sP] · [LR](G)[sP] · [dR](C)[sP] · [dR](C)[sP] · [LR](T)[sP] · [LR](A) |
| SEQ ID 136 | [LR](G)[sP] · [dR](C)[sP] · [LR](G)[sP] · [dR](C)[sP] · [LR](G)[sP] · [dR](A)[sP] · |
| | [dR](T)[sP] · [LR](G)[sP] · [dR](A)[sP] · [dR](C)[sP] · [LR]([5meC])[sP] · |
| | [dR](C)[sP] · [LR](G)[sP] · [dR](C)[sP] · [LR]([5meC])[sP] · [LR](T) |
| SEQ ID 137 | [LR](A)[sP] · [dR](G)[sP] · [dR](C)[sP] · [LR](G)[sP] · [dR](C)[sP] · [LR](G)[sP] · |
| | [dR](A)[sP] · [dR](T)[sP] · [LR](G)[sP] · [dR](A)[sP] · [dR](C)[sP] · [LR]([5meC])[sP] · |
| | [dR]([5meC])[sP] · [dR](G)[sP] · [LR]([5meC])[sP] · [LR]([5meC] |
| SEQ ID 138 | [LR]([5meC])[sP] · [dR](A)[sP] · [dR](G)[sP] · [LR]([5meC])[sP] · [dR](G)[sP] · |
| | [dR](C)[sP] · [LR](G)[sP] · [dR](A)[sP] · [dR](T)[sP] · [LR](G)[sP] · [dR](A)[sP] · |
| | [dR](C)[sP] · [LR]([5meC])[sP] · [dR](C)[sP] · [LR](G)[sP] · [LR]([5meC] |
| SEQ ID 139 | [LR]([5meC])[sP] · [dR](C)[sP] · [LR](A)[sP] · [dR](G)[sP] · [dR](C)[sP] · |
| | [LR](G)[sP] · [dR]([5meC])[sP] · [dR](G)[sP] · [LR](A)[sP] · [dR](T)[sP] · |
| | [dR](G)[sP] · [LR](A)[sP] · [dR](C)[sP] · [dR](C)[sP] · [LR]([5meC])[sP] · [LR](G) |
| SEQ ID 140 | [LR]([5meC])[sP] · [dR](C)[sP] · [dR](C)[sP] · [LR](A)[sP] · [dR](G)[sP] · |
| | [dR](C)[sP] · [LR](G)[sP] · [dR](C)[sP] · [LR](G)[sP] · [dR](A)[sP] · [dR](T)[sP] · |
| | [LR](G)[sP] · [dR](A)[sP] · [dR](C)[sP] · [LR]([5meC])[sP] · [LR]([5meC] |
| SEQ ID 141 | [LR]([5meC])[sP] · [dR](C)[sP] · [dR](C)[sP] · [LR]([5meC])[sP] · [dR](A)[sP] · |
| | [dR](G)[sP] · [LR]([5meC])[sP] · [dR](G)[sP] · [dR](C)[sP] · [LR](G)[sP] · |
| | [dR](A)[sP] · [dR](T)[sP] · [LR](G)[sP] · [dR](A)[sP] · [LR]([5meC])[sP] · [LR]([5meC] |
| SEQ ID 142 | [LR](A)[sP] · [dR](C)[sP] · [LR]([5meC])[sP] · [dR](C)[sP] · [dR](C)[sP] · |
| | [LR](A)[sP] · [dR](G)[sP] · [dR](C)[sP] · [LR](G)[sP] · [dR]([5meC])[sP] · |
| | [dR](G)[sP] · [LR](A)[sP] · [dR](T)[sP] · [dR](G)[sP] · [LR](A)[sP] · [LR]([5meC] |
| SEQ ID 143 | [LR](G)[sP] · [dR](A)[sP] · [dR](C)[sP] · [LR]([5meC])[sP] · [dR](C)[sP] · |
| | [dR](C)[sP] · [LR](A)[sP] · [dR](G)[sP] · [dR](C)[sP] · [LR](G)[sP] · [dR](C)[sP] · |
| | [LR](G)[sP] · [dR](A)[sP] · [dR](T)[sP] · [LR](G)[sP] · [LR](A) |
| SEQ ID 144 | [LR](A)[sP] · [dR](G)[sP] · [LR](A)[sP] · [dR](C)[sP] · [LR]([5meC])[sP] · |
| | [dR](C)[sP] · [dR](C)[sP] · [LR](A)[sP] · [dR](G)[sP] · [dR](C)[sP] · [LR](G)[sP] · |
| | [dR](C)[sP] · [LR](G)[sP] · [dR](A)[sP] · [LR](T)[sP] · [LR](G) |
| SEQ ID 145 | [LR]([5meC])[sP] · [dR](A)[sP] · [dR](G)[sP] · [LR](A)[sP] · [dR](C)[sP] · |
| | [LR]([5meC])[sP] · [dR](C)[sP] · [dR](C)[sP] · [LR](A)[sP] · [dR](G)[sP] · |
| | [dR](C)[sP] · [LR](G)[sP] · [dR]([5meC])[sP] · [dR](G)[sP] · [LR](C)[sP] · [LR](T) |
| SEQ ID 146 | [LR](A)[sP] · [dR](C)[sP] · [dR](A)[sP] · [LR](G)[sP] · [dR](A)[sP] · [dR](C)[sP] · |
| | [LR]([5meC])[sP] · [dR](C)[sP] · [dR](C)[sP] · [LR](A)[sP] · [dR](G)[sP] · |
| | [dR](C)[sP] · [LR](G)[sP] · [dR](C)[sP] · [LR](G)[sP] · [LR](A) |
| SEQ ID 147 | [LR](T)[sP] · [dR](A)[sP] · [dR](C)[sP] · [LR](A)[sP] · [dR](G)[sP] · [LR](A)[sP] · |
| | [dR](C)[sP] · [dR](C)[sP] · [LR]([5meC])[sP] · [dR](C)[sP] · [dR](A)[sP] · |
| | [LR](G)[sP] · [dR]([5meC])[sP] · [dR](G)[sP] · [LR]([5meC])[sP] · [LR](G) |
| SEQ ID 148 | [LR]([5meC])[sP] · [dR](T)[sP] · [LR](A)[sP] · [dR](C)[sP] · [dR](A)[sP] · |
| | [LR](G)[sP] · [dR](A)[sP] · [dR](C)[sP] · [LR]([5meC])[sP] · [dR](C)[sP] · |
| | [dR](C)[sP] · [LR](A)[sP] · [dR](G)[sP] · [dR](C)[sP] · [LR](G)[sP] · [LR]([5meC] |
| SEQ ID 149 | [LR](A)[sP] · [dR](C)[sP] · [dR](T)[sP] · [LR](A)[sP] · [dR](C)[sP] · [LR](A)[sP] · |
| | [dR](G)[sP] · [dR](A)[sP] · [LR]([5meC])[sP] · [dR](C)[sP] · [dR](C)[sP] · |
| | [LR]([5meC])[sP] · [dR](A)[sP] · [dR](G)[sP] · [LR]([5meC])[sP] · [LR](G) |
| SEQ ID 150 | [LR](G)[sP] · [dR](A)[sP] · [dR](C)[sP] · [LR](T)[sP] · [dR](A)[sP] · [dR](C)[sP] · |
| | [LR](A)[sP] · [dR](G)[sP] · [LR](A)[sP] · [dR](C)[sP] · [dR](C)[sP] · |
| | [LR]([5meC])[sP] · [dR](C)[sP] · [dR](A)[sP] · [LR](G)[sP] · [LR]([5meC] |
| SEQ ID 151 | [LR](A)[sP] · [dR](G)[sP] · [LR](A)[sP] · [dR](C)[sP] · [dR](T)[sP] · [LR](A)[sP] · |
| | [dR](C)[sP] · [dR](A)[sP] · [LR](G)[sP] · [dR](A)[sP] · [dR](C)[sP] · |
| | [LR]([5meC])[sP] · [dR](C)[sP] · [dR](C)[sP] · [LR](A)[sP] · [LR](G) |
| SEQ ID 152 | [LR]([5meC])[sP] · [dR](A)[sP] · [dR](G)[sP] · [LR](A)[sP] · [dR](C)[sP] · |
| | [dR](T)[sP] · [LR](A)[sP] · [dR](C)[sP] · [LR](A)[sP] · [dR](G)[sP] · [dR](A)[sP] · |
| | [LR]([5meC])[sP] · [dR](C)[sP] · [dR](C)[sP] · [LR]([5meC])[sP] · [LR](A) |
| SEQ ID 153 | [LR](T)[sP] · [dR](C)[sP] · [LR](A)[sP] · [dR](G)[sP] · [LR](A)[sP] · [dR](C)[sP] · |
| | [dR](T)[sP] · [LR](A)[sP] · [dR](C)[sP] · [LR](A)[sP] · [dR](G)[sP] · |
| | [LR](A)[sP] · [dR](C)[sP] · [dR](C)[sP] · [LR]([5meC])[sP] · [LR]([5meC] |
| SEQ ID 154 | [LR]([5meC])[sP] · [dR](T)[sP] · [dR](C)[sP] · [LR](A)[sP] · [dR](G)[sP] · |
| | [LR](A)[sP] · [dR](C)[sP] · [dR](T)[sP] · [LR](A)[sP] · [dR](C)[sP] · [dR](A)[sP] · |
| | [LR](G)[sP] · [dR](A)[sP] · [dR](C)[sP] · [LR]([5meC])[sP] · [LR]([5meC] |
| SEQ ID 155 | [LR](G)[sP] · [dR](C)[sP] · [dR](T)[sP] · [LR]([5meC])[sP] · [dR](A)[sP] · |
| | [dR](G)[sP] · [LR](A)[sP] · [dR](C)[sP] · [dR](T)[sP] · [LR](A)[sP] · [dR](C)[sP] · |
| | [LR](A)[sP] · [dR](G)[sP] · [dR](A)[sP] · [LR]([5meC])[sP] · [LR]([5meC] |
| SEQ ID 156 | [LR]([5meC])[sP] · [dR](G)[sP] · [dR](C)[sP] · [LR](T)[sP] · [dR](C)[sP] · |
| | [LR](A)[sP] · [dR](G)[sP] · [LR](A)[sP] · [dR](C)[sP] · [dR](T)[sP] · [LR](A)[sP] · |
| | [dR](C)[sP] · [LR](A)[sP] · [dR](G)[sP] · [LR](A)[sP] · [LR]([5meC] |
| SEQ ID 157 | [LR](G)[sP] · [dR](C)[sP] · [LR](G)[sP] · [dR](C)[sP] · [dR](T)[sP] · |
| | [LR]([5meC])[sP] · [dR](A)[sP] · [dR](G)[sP] · [LR](A)[sP] · [dR](C)[sP] · |
| | A[LR](A)[sP] · [dR](C)[sP] · [dR](A)[sP] · [LR](G)[sP] · [LR](A) |
| SEQ ID 158 | [LR](A)[sP] · [dR](G)[sP] · [dR](C)[sP] · [LR](G)[sP] · [dR](C)[sP] · [dR](T)[sP] · |
| | [LR]([5meC])[sP] · [dR](A)[sP] · [dR](G)[sP] · [LR](A)[sP] · [dR](C)[sP] · |
| | [dR](T)[sP] · [LR](A)[sP] · [dR](C)[sP] · [LR](A)[P] · [LR](G) |
| SEQ ID 159 | [LR](T)[sP] · [dR](A)[sP] · [dR](G)[sP] · [LR]([5meC])[sP] · [dR](G)[sP] · |
| | [dR](C)[sP] · [LR](T)[sP] · [dR](C)[sP] · [LR](A)[sP] · [dR](G)[sP] · [dR](A)[sP] · |
| | [LR]([5meC])[sP] · [dR](T)[sP] · [dR](A)[sP] · [LR]([5meC])sP] · [LR](A) |
| SEQ ID 160 | [LR](G)[sP] · [dR](T)[sP] · [LR](A)[sP] · [dR](G)[sP] · [dR](C)[sP] · [LR](G)[sP] · |
| | [dR](C)[sP] · [dR](T)[sP] · [LR]([5meC])[sP] · [dR](A)[sP] · [dR](G)[sP] · |
| | [LR](A)[sP] · [dR](C)[sP] · [dR](T)[sP] · [LR](A)[sP] · [LR]([5meC] |
| SEQ ID 161 | [LR](G)[sP] · [dR](G)[sP] · [dR](T)[sP] · [LR](A)[sP] · [dR](G)[sP] · [dR](C)[sP] · |
| | [LR](G)[sP] · [dR](C)[sP] · [dR](T)[sP] · [LR]([5meC])[sP] · [dR](A)[sP] · |
| | [dR](G)[sP] · [LR](A)[sP] · [dR](C)[sP] · [LR](T)[sP] · [LR](A) |
| SEQ ID 162 | [LR](G)[sP] · [dR](G)[sP] · [LR](G)[sP] · [dR](T)[sP] · [LR](A)[sP] · [dR](G)[sP] · |
| | [dR](C)[sP] · [LR](G)[sP] · [dR](C)[sP] · [LR](T)[sP] · [dR](C)[sP] · |
| | [LR](A)[sP] · [dR](G)[sP] · [dR](A)[sP] · [LR]([5meC])[sP] · [LR](T) |
| SEQ ID 163 | [LR]([5meC])[sP] · [dR](G)[sP] · [dR](G)[sP] · [LR](G)[sP] · [dR](T)[sP] · |
| | [LR](A)[sP] · [dR](G)[sP] · [dR](C)[sP] · [LR](G)[sP] · [dR](C)[sP] · [dR](T)[sP] · |
| | [LR]([5meC])[sP] · [dR](A)[sP] · [dR](G)[sP] · [LR](A)[sP] · [LR]([5meC] |
| SEQ ID 164 | [LR]([5meC])[sP] · [dR]([5meC])[sP] · [dR](G)[sP] · [LR](G)[sP] · [dR](G)[sP] · |
| | [dR](T)[sP] · [LR](A)[sP] · [dR](G)[sP] · [dR](C)[sP] · [LR](G)[sP] · |
| | [dR](C)[sP] · [LR](T)[sP] · [dR](C)[sP] · [dR](A)[sP] · [LR](G)[sP] · [LR](A) |
| SEQ ID 165 | [LR](A)[sP] · [dR](C)[sP] · [LR]([5meC])[sP] · [dR](G)[sP] · [dR](G)[sP] · |
| | [LR](G)[sP] · [dR](T)[sP] · [LR](A)[sP] · [dR](G)[sP] · [dR](C)[sP] · [LR] |
| | [dR](C)[sP] · [LR](T)[sP] · [dR](C)[sP] · [LR](A)[sP] · [LR](G) |
| SEQ ID 166 | [LR](A)[sP] · [dR](A)[sP] · [dR](C)[sP] · [LR]([5meC])[sP] · [dR](G)[sP] · |
| | [dR](G)[sP] · [LR](G)[sP] · [dR](T)[sP] · [LR](A)[sP] · [dR](G)[sP] · [dR](C)[sP] · |
| | [LR](G)[sP] · [dR](C)[sP] · [dR](T)[sP] · [LR]([5meC])[sP] · [LR](A) |
| SEQ ID 167 | [LR]([5meC])[sP] · [dR](A)[sP] · [LR](A)[P] · [dR](C)[sP] · [LR]([5meC])[sP] · |
| | [dR](G)[sP] · [dR](G)[sP] · [LR](G)[sP] · [dR](T)[sP] · [LR](A)[sP] · |
| | [dR](G)[sP] · [dR](C)[sP] · [LR](G)[sP] · [dR](C)[sP] · [LR](T)[sP] · [LR]([5meC]) |
| SEQ ID 168 | [LR](G)[sP] · [dR](C)[sP] · [LR](A)[sP] · [dR](A)[sP] · [dR](C)[sP] · |
| | [LR]([5meC])[sP] · [dR](G)[sP] · [dR](G)[sP] · [LR](G)[sP] · [dR](T)[sP] · [dR] |
| | [LR](G)[sP] · [dR]([5meC])[sP] · [dR](G)[sP] · [LR]([5meC])[sP] · [LR](T) |
| SEQ ID 169 | [LR](A)[sP] · [dR](G)[sP] · [dR](C)[sP] · [LR](A)[sP] · [dR](A)[sP] · [dR](C)[sP] · |
| | [LR]([5meC])[sP] · [dR](G)[sP] · [dR](G)[sP] · [LR](G)[sP] · [dR](T)[sP] · |
| | [LR](A)[sP] · [dR](G)[sP] · [dR](C)[sP] · [LR](G)[sP] · [LR]([5meC] |
| SEQ ID 170 | [LR]([5meC])[sP] · [dR](A)[sP] · [LR](G)[sP] · [dR](C)[sP] · [LR](A)[sP] · |
| | [dR](A)[sP] · [dR](C)[sP] · [LR]([5meC])[sP] · [dR](G)[sP] · [dR](G)[sP] · |
| | [LR](G)[sP] · [dR](T)[sP] · [LR](A)[sP] · [dR](G)[sP] · [LR]([5meC])[sP] · [LR](G) |
| SEQ ID 171 | [LR](G)[sP] · [dR](C)[sP] · [LR](A)[sP] · [dR](G)[sP] · [dR](C)[sP] · [LR](A)[sP] · |
| | [dR](A)[sP] · [dR](C)[sP] · [LR]([5meC])[sP] · [dR](G)[sP] · [dR](G)[sP] · |
| | [LR](G)[sP] · [dR](T)[sP] · [dR](A)[sP] · [LR](G)[sP] · [LR]([5meC] |
| SEQ ID 172 | [LR](A)[sP] · [dR](G)[sP] · [dR](C)[sP] · [LR](A)[sP] · [dR](G)[sP] · [dR](C)[sP] · |
| | [LR](A)[sP] · [dR](A)[sP] · [dR](C)[sP] · [LR]([5meC])[sP] · [dR](GC)[sP] · |
| | [dR](G)[sP] · [LR](G)[sP] · [dR](T)[sP] · [LR](A)[sP] · [LR](G) |
| SEQ ID 173 | [LR]([5meC])[sP] · [dR](A)[sP] · [LR](G)[sP] · [dR](C)[sP] · [LR](A)[sP] · |
| | [dR](G)[sP] · [dR](C)[sP] · [LR](A)[sP] · [LR](A)[sP] · [dR](C)[sP] · [dR](C)[sP] · |
| | [LR](C)[sP] · [dR](G)[sP] · [dR](G)[sP] · [LR](T)[sP] · [LR](A) |
| SEQ ID 174 | [LR](G)[sP] · [dR](C)[sP] · [LR](A)[sP] · [dR](G)[sP] · [dR](C)[sP] · [LR](A)[sP] · |
| | [dR](G)[sP] · [dR](C)[sP] · [LR](A)[sP] · [dR](A)[sP] · [dR](C)[sP] · |
| | [LR]([5meC])[sP] · [dR](G)[sP] · [dR](G)[sP] · [LR](G)[sP] · [LR](T) |
| SEQ ID 175 | [LR](G)[sP] · [dR](G)[sP] · [dR](C)[sP] · [LR](A)[sP] · [dR](G)[sP] · [dR](C)[sP] · |
| | [LR](A)[sP] · [dR](G)[sP] · [dR](C)[sP] · [LR](A)[sP] · [dR](A)[sP] · |
| | [dR](C)[sP] · [LR]([5meC])[sP] · [dR](G)[sP] · [LR](G)[sP] · [LR](G) |
| SEQ ID 176 | [LR](G)[sP] · [dR](G)[sP] · [LR](G)[sP] · [dR](C)[sP] · [LR](A)[sP] · [dR](G)[sP] · |
| | [dR](C)[sP] · [LR](A)[sP] · [dR](G)[sP] · [dR](C)[sP] · [LR](A)[sP] · |
| | [LR](A)[sP] · [dR](C)[sP] · [dR](C)[sP] · [LR](G)[sP] · [LR](G) |
| SEQ ID 177 | [LR](T)[sP] · [dR](G)[sP] · [dR](G)[sP] · [LR](G)[sP] · [dR](C)[sP] · [LR](A)[sP] · |
| | [dR](G)[sP] · [dR](C)[sP] · [LR](A)[sP] · [dR](G)[sP] · [dR](C)[sP] · |
| | [LR](A)[sP] · [dR](A)[sP] · [dR](C)[sP] · [LR]([5meC])[sP] · [LR](G) |
| SEQ ID 178 | [LR](T)[sP] · [dR](T)[sP] · [dR](G)[sP] · [LR](G)[sP] · [dR](G)[sP] · [dR](C)[sP] · |
| | [LR](A)[sP] · [dR](G)[sP] · [dR](C)[sP] · [LR](A)[sP] · [dR](G)[sP] · |
| | [dR](C)[sP] · [LR](A)[sP] · [dR](A)[sP] · [LR]([5meC])[sP] · [LR]([5meC] |
| SEQ ID 179 | [LR]([5meC])[sP] · [dR](T)[sP] · [LR](T)[sP] · [dR](G)[sP] · [dR](G)[sP] · |
| | [LR](G)[sP] · [dR](C)[sP] · [LR](A)[sP] · [dR](G)[sP] · [dR](C)[sP] · [LR](A)[sP] · |
| | [dR](G)[sP] · [dR](C)[sP] · [LR](A)[sP] · [LR](A)[sP] · [LR]([5meC] |
| SEQ ID 180 | [LR]([5meC])[sP] · [dR](C)[sP] · [dR](T)[sP] · [LR](T)[sP] · [dR](G)[sP] · |
| | [dR](G)[sP] · [LR](G)[sP] · [dR](C)[sP] · [LR](A)[sP] · [dR](G)[sP] · [dR](C)[sP] · |
| | [LR](A)[sP] · [dR](G)[sP] · [dR](C)[sP] · [LR](A)[sP] · [LR](A) |
| SEQ ID 181 | [LR](T)[sP] · [dR](C)[sP] · [dR](C)[sP] · [LR](T)[sP] · [dR](T)[sP] · [dR](G)[sP] · |
| | [LR](G)[sP] · [dR](G)[sP] · [dR](C)[sP] · [LR](A)[sP] · [dR](G)[sP] · |
| | [dR](C)[sP] · [LR](A)[sP] · [dR](G)[sP] · [LR]([5meC])[sP] · [LR](A) |
| SEQ ID 182 | [LR](G)[sP] · [dR](T)[sP] · [LR]([5meC])[sP] · [dR](C)[sP] · [dR](T)[sP] · |
| | [LR](T)[sP] · [dR](G)[sP] · [dR](G)[sP] · [LR](G)[sP] · [dR](C)[sP] · [dR](A)[sP] · |
| | [LR](G)[sP] · [dR](C)[sP] · [dR](A)[sP] · [LR](G)[sP] · [LR]([5meC] |
| SEQ ID 183 | [LR](G)[sP] · [dR](G)[sP] · [dR](T)[sP] · [LR]([5meC])[sP] · [dR](C)[sP] · |
| | [dR](T)[sP] · [LR](T)[sP] · [dR](G)[sP] · [dR](G)[sP] · [LR](G)[sP] · [dR](C)[sP] · |
| | [LR](A)[sP] · [dR](G)[sP] · [dR](C)[sP] · [LR](A)[sP] · [LR](G) |
| SEQ ID 184 | [LR]([5meC])[sP] · [dR](G)[sP] · [dR](G)[sP] · [LR](T)[sP] · [dR](C)[sP] · |
| | [dR](C)[sP] · [LR](T)[sP] · [dR](T)[sP] · [LR](G)[sP] · [dR](G)[sP] · [dR](G)[sP] · |
| | [LR]([5meC])[sP] · [dR](A)[sP] · [dR](G)[sP] · [LR]([5meC])[sP] · [LR](A) |
| SEQ ID 185 | [LR](G)[sP] · [dR](C)[sP] · [LR](G)[sP] · [dR](G)[sP] · [dR](T)[P] · [LR]([5meC])[sP] · |
| | [dR](C)[sP] · [dR](T)[sP] · [LR](T)[sP] · [dR](G)[sP] · [dR](G)[sP] · [LR](G)[sP] · |
| | [dR](C)[sP] · [dR](A)[sP] · [LR](G)[sP] · [LR]([5meC] |
| SEQ ID 186 | [LR]([5meC])[sP] · [dR](G)[sP] · [dR](C)[sP] · [LR](G)[sP] · [dR](G)[sP] · |
| | [dR](T)[sP] · [LR]([5meC])[sP] · [dR](C)[sP] · [dR](T)[sP] · [LR](T)[sP] · |
| | [dR](G)[sP] · [dR](G)[sP] · [LR](G)[sP] · [dR](C)[sP] · [LR](A)[sP] · [LR](G) |
| SEQ ID 187 | [LR]([5meC])[sP] · [dR](C)[sP] · [LR](G)[sP] · [dR]([5meC])[sP] · [dR](G)[sP] · |
| | [LR](G)[sP] · [dR](T)[sP] · [dR](C)[sP] · [LR]([5meC])[sP] · [dR](T)[sP] · |
| | [dR](T)[sP] · [LR](G)[sP] · [dR](G)[sP] · [dR](G)[sP] · [LR]([5meC])[sP] · [LR](A |
| SEQ ID 188 | [LR](T)[sP] · [dR](C)[sP] · [dR](C)[sP] · [LR](G)[sP] · [dR](C)[sP] · [LR](G)[sP] · |
| | [dR](G)[sP] · [dR](T)[sP] · [LR]([5meC])[sP] · [dR](C)[sP] · [dR](T)[sP] · |
| | [LR](T)[sP] · [dR](G)[sP] · [dR](G)[sP] · [LR](G)[sP] · [LR]([5meC] |
| SEQ ID 189 | [LR]([5meC])[sP] · [dR](T)[sP] · [dR](C)[sP] · [LR]([5meC])[sP] · [dR](G)[sP] · |
| | [dR](C)[sP] · [LR](G)[sP] · [dR](G)[sP] · [LR](T)[sP] · [dR](C)[sP] · |
| | [dR](C)[sP] · [LR](T)[sP] · [dR](T)[sP] · [dR](G)[sP] · [LR](G)[sP] · [LR](G) |
| SEQ ID 190 | [LR](A)[sP] · [dR](C)[sP] · [LR](T)[sP] · [dR](C)[sP] · [dR](C)[sP] · [LR](G)[sP] · |
| | [dR]([5meC])[sP] · [dR](G)[sP] · [LR](G)[sP] · [dR](T)[sP] · [dR](C)[sP] · |
| | [LR]([5meC])[sP] · [dR](T)[sP] · [dR](T)[sP] · [LR](G)[sP] · [LR](G) |
| SEQ ID 191 | [LR](G)[sP] · [dR](A)[sP] · [dR](C)[sP] · [LR](T)[sP] · [dR](C)[sP] · [dR](C)[sP] · |
| | [LR](G)[sP] · [dR](C)[sP] · [LR](G)[sP] · [dR](G)[sP] · [dR](T)[sP] · |
| | [LR]([5meC])[sP] · [dR](C)[sP] · [dR](T)[sP] · [LR](T)[sP] · [LR](G) |
| SEQ ID 192 | [LR]([5meC])[sP] · [dR](G)[sP] · [LR](A)[sP] · [dR](C)[sP] · [dR](T)[sP] · |
| | [LR]([5meC])[sP] · [dR]([5meC])[sP] · [dR](G)[sP] · [LR]([5meC])[sP] · [dR](G)[sP] · |
| | [dR](G)[sP] · [LR](T)[sP] · [dR](C)[sP] · [dR](C)[sP] · [LR](T)[sP] · [LR](T) |
| SEQ ID 193 | [LR]([5meC])[sP] · [dR](C)[sP] · [LR](G)[sP] · [dR](A)[sP] · [dR](C)[sP] · |
| | [LR](T)[sP] · [dR](C)[sP] · [dR](C)[sP] · [LR](G)[sP] · [dR]([5meC])[sP] · |
| | [dR](G)[sP] · [LR](G)[sP] · [dR](T)[sP] · [dR](C)[sP] · [LR]([5meC])[sP] · [LR](T) |
| SEQ ID 194 | [LR](T)[sP] · [dR](C)[sP] · [dR](C)[sP] · [LR](G)[sP] · [dR](A)[sP] · [dR](C)[sP] · |
| | [LR](T)[sP] · [dR](C)[sP] · [dR](C)[sP] · [LR](G)[sP] · [dR](C)[sP] · |
| | [LR](G)[sP] · [dR](G)[sP] · [dR](T)[sP] · [LR]([5meC])[sP] · [LR](5meC] |
| SEQ ID 195 | [LR](G)[sP] · [dR](T)[sP] · [LR]([5meC])[sP] · [dR](C)[sP] · [LR](G)[sP] · |
| | [dR](A)[sP] · [dR](C)[sP] · [LR](T)[sP] · [dR](C)[sP] · [dR](C)[sP] · [LR](G)[sP] · |
| | [dR](C)[sP] · [LR](G)[sP] · [dR](G)[sP] · [LR](T)[sP] · [LR]([5meC] |
| SEQ ID 196 | [LR]([5meC])[sP] · [dR](G)[sP] · [LR](T)[sP] · [dR](C)[sP] · [dR](C)[sP] · |
| | [LR](G)[sP] · [dR](A)[sP] · [dR](C)[sP] · [LR](T)[sP] · [dR](C)[sP] · [dR](C)[sP] · |
| | [LR](G)[sP] · [dR]([5meC])[sP] · [dR](G)[sP] · [LR](G)[sP] · [LR](T) |
| SEQ ID 197 | [LR](G)[sP] · [dR]([5meC])[sP] · [dR](G)[sP] · [LR](T)[sP] · [dR](C)[sP] · |
| | [dR](C)[sP] · [LR](G)[sP] · [dR](A)[sP] · [dR](C)[sP] · [LR](T)[sP] · [dR](C)[sP] · |
| | [dR](C)[sP] · [LR](G)[sP] · [dR](C)[sP] · [LR](G)[sP] · [LR](G) |
| SEQ ID 198 | [LR](T)[sP] · [dR](G)[sP] · [dR](C)[sP] · [LR](G)[sP] · [dR](T)[sP] · [dR](C)[sP] · |
| | [LR]([5meC])[sP] · [dR](G)[sP] · [LR](A)[sP] · [dR](C)[sP] · [dR](T)[sP] · |
| | [LR]([5meC])[sP] · [dR]([5meC])[sP] · [dR](G)[sP] · [LR]([5meC])[sP] · [LR](G) |
| SEQ ID 199 | [LR]([5meC])[sP] · [dR](T)[sP] · [LR](G)[sP] · [dR]([5meC])[sP] · [dR](G)[sP] · |
| | [LR](T)[sP] · [dR](C)[sP] · [dR](C)[sP] · [LR](G)[sP] · [dR](A)[sP] · |
| | [dR](C)[sP] · [LR](T)[sP] · [dR](C)[sP] · [dR](C)[sP] · [LR](G)[sP] · [LR]([5meC] |
| SEQ ID 200 | [LR]([5meC])[sP] · [dR](C)[sP] · [dR](T)[sP] · [LR](G)[sP] · [dR]([5meC])[sP] · |
| | [dR](G)[sP] · [LR](T)[sP] · [dR](C)[sP] · [dR](C)[sP] · [LR](G)[sP] · |
| | [dR](A)[sP] · [dR](C)[sP] · [LR](T)[sP] · [dR](C)[sP] · [LR]([5meC])[sP] · [LR](G) |
| SEQ ID 201 | [LR](G)[sP] · [dR](C)[sP] · [dR](C)[sP] · [LR](T)[sP] · [dR](G)[sP] · [dR](C)[sP] · |
| | [LR](G)[sP] · [dR](T)[sP] · [dR](C)[sP] · [LR]([5meC])[sP] · [dR](G)[sP] · |
| | [LR](A)[sP] · [dR](C)[sP] · [dR](T)[sP] · [LR]([5meC])[sP] · [LR]([5meC] |
| SEQ ID 202 | [LR](T)[sP] · [dR](G)[sP] · [dR](C)[sP] · [LR]([5meC])[sP] · [dR](T)[sP] · |
| | [LR](G)[sP] · [dR]([5meC])[sP] · [dR](G)[sP] · [LR](T)[sP] · [dR](C)[sP] · |
| | [dR](C)[sP] · [LR](G)[sP] · [dR](A)[sP] · [dR](C)[sP] · [LR](T)[sP] · [LR]([5meC] |
| SEQ ID 203 | [LR]([5meC])[sP] · [dR](T)[sP] · [dR](G)[sP] · [LR]([5meC])[sP] · [dR](C)[sP] · |
| | [dR](T)[sP] · [LR](G)[sP] · [dR]([5meC])[sP] · [dR](G)[sP] · [LR](T)[sP] · |
| | [dR](C)[sP] · [dR](C)[sP] · [LR](G)[sP] · [dR](A)[sP] · [LR]([5meC])[sP] · [LR](T) |
| SEQ ID 204 | [LR](T)[sP] · [dR](C)[sP] · [dR](T)[sP] · [LR](G)[sP] · [dR](C)[sP] · [dR](C)[sP] · |
| | [LR](T)[sP] · [dR](G)[sP] · [dR](C)[sP] · [LR](G)[sP] · [dR](T)[sP] · |
| | [dR](C)[sP] · [LR]([5meC])[sP] · [dR](G)[sP] · [LR](A)[sP] · [LR]([5meC] |
| SEQ ID 205 | [LR](G)[sP] · [dR](T)[sP] · [dR](C)[sP] · [LR](T)[sP] · [dR](G)[sP] · [dR](C)[sP] · |
| | [LR]([5meC])[sP] · [dR](T)[sP] · [LR](G)[sP] · [dR]([5meC])[sP] · |
| | [dR](G)[sP] · [LR](T)[sP] · [dR](C)[sP] · [dR](C)[sP] · [LR](G)[sP] · [LR](A) |
| SEQ ID 206 | [LR](G)[sP] · [dR](G)[sP] · [LR](T)[sP] · [dR](C)[sP] · [dR](T)[sP] · [LR](G)[sP] · |
| | [dR](C)[sP] · [dR](C)[sP] · [LR](T)[sP] · [dR](G)[sP] · [dR](C)[sP] · |
| | [LR](G)[sP] · [dR](T)[sP] · [dR](C)[sP] · [LR]([5meC])[sP] · [LR](G) |
| SEQ ID 207 | [LR](G)[sP] · [dR](C)[sP] · [LR](T)[sP] · [dR](C)[sP] · [dR](C)[sP] · |
| | [LR]([5meC])[sP] · [dR](A)[sP] · [LR](T)[sP] · [dR](T)[sP] · [dR](G)[sP] · [LR](G)[sP] · |
| | [dR](C)[sP] · [dR](T)[sP] · [LR](A)[sP] · [dR](C)[sP] · [dR](T)[sP] · [LR](T)[sP] · [LR](A) |
| SEQ ID 208 | [LR]([5meC])[sP] · [dR](G)[sP] · [dR](C)[sP] · [LR](T)[sP] · [dR](C)[sP] · [dR](C)[sP] · |
| | [LR]([5meC])[sP] · [dR](A)[sP] · [LR](T)[sP] · [dR](T)[sP] · [dR](G)[sP] · [LR](G)[sP] · |
| | [dR](C)[sP] · [dR](T)[sP] · [LR](A)[sP] · [dR](C)[sP] · [LR](T)[sP] · [LR](T) |
| SEQ ID 209 | [LR]([5meC])[sP] · [dR](C)[sP] · [LR](G)[sP] · [dR](C)[sP] · [dR](T)[sP] · |
| | [LR]([5meC])[sP] · [dR](C)[sP] · [dR](C)[sP] · [LR](A)[sP] · [dR](T)[sP] · [dR](T)[sP] · |
| | [LR](G)[sP] · [dR](G)[sP] · [dR](C)[sP] · [dR](T)[sP] · [dR](A)[sP] · [LR]([5meC])[sP] |
| SEQ ID 210 | [LR]([5meC])[sP] · [dR](C)[sP] · [dR](C)[sP] · [LR](G)[sP] · [dR](C)[sP] · [LR](T)[sP] · |
| | [dR](C)[sP] · [dR](C)[sP] · [LR]([5meC])[sP] · [dR](A)[sP] · [LR](T)[sP] · [dR](T)[sP] · |
| | [dR](G)[sP] · [LR](G)[sP] · [dR](C)[sP] · [dR](T)[sP] · [LR](A)[sP] · [LR]([5meC]) |
| SEQ ID 211 | [LR](A)[sP] · [dR](C)[sP] · [LR]([5meC])[sP] · [dR](C)[sP] · [LR](G)[sP] · [dR](C)[sP] · |
| | [dR](T)[sP] · [LR]([5meC])[sP] · [dR](C)[sP] · [dR](C)[sP] · [LR](A)[sP] · [dR](T)[sP] · |
| | [dR](T)[sP] · [LR](G)[sP] · [dR](G)[sP] · [dR](C)[sP] · [LR](T)[sP] · [LR](A) |
| SEQ ID 212 | [LR](T)[sP] · [dR](A)[sP] · [dR](C)[sP] · [LR]([5meC])[sP] · [dR](C)[sP] · [LR](G)[sP] · |
| | [dR](C)[sP] · [dR](T)[sP] · [LR]([5meC])[sP] · [dR](C)[sP] · [dR](C)[sP] · [LR](A)[sP] · |
| | [dR](T)[sP] · [LR](T)[sP] · [dR](G)[sP] · [dR](G)[sP] · [LR]([5meC])[sP] · [LR](T) |
| SEQ ID 213 | [LR]([5meC])[sP] · [dR](T)[sP] · [LR](A)[sP] · [dR](C)[sP] · [dR](C)[sP] · [LR]([5meC])[sP] · |
| | [dR](G)[sP] · [dR](C)[sP] · [LR](T)[sP] · [dR](C)[sP] · [dR](C)[sP] · [LR]([5meC])[sP] · |
| | [dR](A)[sP] · [LR](T)[sP] · [dR](T)[sP] · [dR](G)[sP] · [LR](G)[sP] · [LR]([5meC] |
| SEQ ID 214 | [LR](G)[sP] · [dR](C)[sP] · [dR](T)[sP] · [LR](A)[sP] · [dR](C)[sP] · [LR]([5meC])[sP] · |
| | [dR](C)[sP] · [LR](G)[sP] · [dR](C)[sP] · [dR](T)[sP] · [LR]([5meC])[sP] · [dR](C)[sP] · |
| | [dR](C)[sP] · [LR](A)[sP] · [dR](T)[sP] · [dR](T)[sP] · [LR](G)[sP] · [LR](G) |
| SEQ ID 215 | [LR](G)[sP] · [dR](G)[sP] · [dR](C)[sP] · [LR](T)[sP] · [dR](A)[sP] · [dR](C)[sP] · |
| | [LR]([5meC])[sP] · [dR](C)[sP] · [LR](G)[sP] · [dR](C)[sP] · [dR](T)[sP] · [LR]([5meC][sP] · |
| | [dR](C)[sP] · [dR](C)[sP] · [LR](A)[sP] · [dR](T)[sP] · [LR](T)[sP] · [LR](G) |
| SEQ ID 216 | [LR](G)[sP] · [dR](G)[sP] · [LR](G)[sP] · [dR](C)[sP] · [dR](T)[sP] · [LR](A)[sP] · |
| | [dR](C)[sP] · [dR](C)[sP] · [LR]([5meC])[sP] · [dR](G)[sP] · [dR](C)[sP] · [LR](T)[sP] · |
| | [dR](C)[sP] · [dR](C)[sP] · [LR]([5meC])[sP] · [dR](A)[sP] · [LR](T)[sP] · [LR](T) |
| SEQ ID 217 | [LR](A)[sP] · [dR](G)[sP] · [dR](G)[sP] · [LR](G)[sP] · [dR](C)[sP] · [dR](T)[sP] · |
| | [LR](A)[sP] · [dR](C)[sP] · [LR]([5meC])[sP] · [dR](C)[sP] · [LR](G)[sP] · [dR](C)[sP] · |
| | [dR](T)[sP] · [LR]([5meC])[sP] · [dR](C)[sP] · [dR](C)[sP] · [LR](A)[sP] · [LR](T) |
| SEQ ID 218 | [LR]([5meC])[sP] · [dR](A)[sP] · [LR](G)[sP] · [dR](G)[sP] · [LR](G)[sP] · [dR](C)[sP] · |
| | [dR](T)[sP] · [LR](A)[sP] · [dR](C)[sP] · [dR](C)[sP] · [LR]([5meC])[sP] · [dR](G)[sP] · |
| | [dR](C)[sP] · [LR](T)[sP] · [dR](C)[sP] · [dR](C)[sP] · [LR]([5meC])[sP] · [LR](A) |
| SEQ ID 219 | [LR](T)[sP] · [dR](C)[sP] · [LR](A)[sP] · [dR](G)[sP] · [dR](G)[sP] · [LR](G)[sP] · |
| | [dR](C)[sP] · [dR](T)[sP] · [LR](A)[sP] · [dR](C)[sP] · [dR](C)[sP] · [LR]([5meC])[sP] · |
| | [dR](G)[sP] · [dR](C)[sP] · [LR](T)[sP] · [dR](C)[sP] · [LR]([5meC])[sP] · [LR]([5meC]) |
| SEQ ID 220 | [LR](A)[sP] · [dR](T)[sP] · [dR](C)[sP] · [LR](A)[sP] · [dR](G)[sP] · [dR](G)[sP] · |
| | [LR](G)[sP] · [dR](C)[sP] · [dR](T)[sP] · [LR](A)[sP] · [dR](C)[sP] · [LR]([5meC])[sP] · |
| | [dR](C)[sP] · [LR](G)[sP] · [dR](C)[sP] · [dR](T)[sP] · [LR]([5meC])[sP] · [LR]([5meC] |
| SEQ ID 221 | [LR](G)[sP] · [dR](A)[sP] · [LR](T)[sP] · [dR](C)[sP] · [LR](A)[sP] · [dR](G)[sP] · |
| | [dR](G)[sP] · [LR](G)[sP] · [dR](C)[sP] · [dR](T)[sP] · [LR](A)[sP] · [dR](C)[sP] · |
| | [dR](C)[sP] · [LR]([5meC])[sP] · [dR](G)[sP] · [dR](C)[sP] · [LR](T)[sP] · [LR][(5meC] |
| SEQ ID 222 | [LR](G)[sP] · [dR](G)[sP] · [LR](A)[sP] · [dR](T)[sP] · [dR](C)[P] · [LR](A)[sP] · |
| | [dR](G)[sP] · [dR](G)[sP] · [LR](G)[sP] · [dR](C)[sP] · [dR](T)[sP] · [LR](A)[sP] · |
| | [dR](C)[sP] · [dR](C)[sP] · [LR]([5meC])[sP] · [dR](G)[sP] · [LR]([5meC])[sP] · [LR](T) |
| SEQ ID 223 | [LR](G)[sP] · [dR](G)[sP] · [dR](G)[sP] · [LR](A)[sP] · [dR](T)[sP] · [dR](C)[sP] · |
| | [LR](A)[sP] · [dR](G)[sP] · [dR](G)[sP] · [LR](G)[sP] · [dR](C)[sP] · [dR](T)[sP] · |
| | [LR](A)[sP] · [dR](C)[sP] · [LR]([5meC])[sP] · [dR](C)[sP] · [LR](G)[sP] · [LR][(5meC] |
| SEQ ID 224 | [LR](A)[sP] · [dR](G)[sP] · [dR](G)[sP] · [LR](G)[sP] · [dR](A)[sP] · [LR](T)[sP] · |
| | [dR](C)[sP] · [LR](A)[sP] · [dR](G)[sP] · [dR](G)[sP] · [LR](G)[sP] · [dR](C)[sP] · |
| | [dR](T)[sP] · [LR](A)[sP] · [dR](C)[sP] · [dR](C)[sP] · [LR]([5meC])[sP] · [LR](G) |
| SEQ ID 225 | [LR]([5meC])[sP] · [dR](A)[sP] · [LR](G)[sP] · [dR](G)[sP] · [dR](G)[sP] · [LR](A)[sP] · |
| | [dR](T)[sP] · [dR](C)[sP] · [LR](A)[sP] · [dR](G)[sP] · [dR](G)[sP] · [LR](G)[sP] · |
| | [dR](C)[sP] · [dR](T)[sP] · [LR](A)[sP] · [dR](C)[sP] · [LR]([5meC])[sP] · [LR]([5meC] |
| SEQ ID 226 | [LR]([5meC])[sP] · [dR](C)[sP] · [LR](A)[sP] · [dR](G)[sP] · [dR](G)[sP] · [LR](G)[sP] · |
| | [dR](A)[sP] · [LR](T)[sP] · [dR](C)[sP] · [LR](A)[sP] · [dR](G)[sP] · [dR](G)[sP] · |
| | [LR](G)[sP] · [dR](C)[sP] · [dR](T)[sP] · [LR](A)[sP] · [LR]([5meC])[sP] · [LR]([5meC] |
| SEQ ID 227 | [LR](G)[sP] · [dR](C)[sP] · [dR](C)[sP] · [LR](A)[sP] · [dR](G)[sP] · [dR](G)[sP] · |
| | [LR](G)[sP] · [dR](A)[sP] · [LR](T)[sP] · [dR](C)[sP] · [LR](A)[sP] · [dR](G)[sP] · |
| | [dR](G)[sP] · [LR](G)[sP] · [dR](C)[sP] · [dR](T)[sP] · [LR](A)[sP] · [LR]([5meC] |
| SEQ ID 228 | [LR](G)[sP] · [dR](G)[sP] · [dR](C)[sP] · [LR]([5meC])[sP] · [dR](A)[sP] · [LR](G)[sP] · |
| | [dR](G)[sP] · [dR](G)[sP] · [LR](A)[sP] · [dR](T)[sP] · [dR](C)[sP] · [LR](A)[sP] · |
| | [dR](G)[sP] · [dR](G)[sP] · [LR](G)[sP] · [dR](C)[sP] · [LR](T)[sP] · [LR](A) |
| SEQ ID 229 | [LR](T)[sP] · [dR](G)[sP] · [LR](G)[sP] · [dR](C)[sP] · [dR](C)[sP] · [LR](A)[sP] · |
| | [dR](G)[sP] · [dR](G)[sP] · [LR](G)[sP] · [dR](A)[sP] · [LR](T)[sP] · [dR](C)[sP] · |
| | [dR](A)[sP] · [LR](G)[sP] · [dR](G)[sP] · [dR](G)[sP] · [LR]([5meC])[sP] · [LR](T) |
| SEQ ID 230 | [LR](T)[sP] · [dR](T)[sP] · [dR](G)[sP] · [LR](G)[sP] · [dR](C)[sP] · [dR](C)[sP] · |
| | [LR](A)[sP] · [dR](G)[sP] · [dR](G)[sP] · [LR](G)[sP] · [dR](A)[sP] · [LR](T)[sP] · |
| | [dR](C)[sP] · [LR](A)[sP] · [dR](G)[sP] · [dR](G)[sP] · [LR](G)[sP] · [LR]([5meC] |
| SEQ ID 231 | [LR](A)[sP] · [dR](T)[sP] · [LR](T)[sP] · [dR](G)[sP] · [LR](G)[sP] · [dR](C)[sP] · |
| | [dR](C)[sP] · [LR](A)[sP] · [dR](G)[sP] · [dR](G)[sP] · [LR](G)[sP] · [dR](A)[sP] · |
| | [dR](T)[sP] · [LR]([5meC])[sP] · [dR](A)[sP] · [dR](G)[sP] · [LR](G)[sP] · [LR](G) |
| SEQ ID 232 | [LR]([5meC])[sP] · [dR](A)[P] · [LR](T)[sP] · [dR](T)[sP] · [dR](G)[sP] · [LR](G)[sP] · |
| | [dR](C)[sP] · [dR](C)[sP] · [LR](A)[sP] · [dR](G)[sP] · [dR](G)[sP] · [LR](G)[sP] · |
| | [dR](A)[sP] · [LR](T)[sP] · [dR](C)[sP] · [dR](A)[sP] · [LR](G)[sP] · [LR](G) |
| SEQ ID 233 | [LR]([5meC])[sP] · [dR](C)[sP] · [dR](A)[sP] · [LR](T)[sP] · [dR](T)[sP] · [dR](G)[sP] · |
| | [LR](G)[sP] · [dR](C)[sP] · [dR](C)[sP] · [LR](A)[sP] · [dR](G)[sP] · [dR](G)[sP] · |
| | [LR](G)[sP] · [dR](A)[sP] · [LR](T)[sP] · [dR](C)[sP] · [LR](A)[sP] · [LR](G) |
| SEQ ID 234 | [LR](T)[sP] · [dR](C)[sP] · [dR](C)[sP] · [LR](A)[sP] · [dR](T)[sP] · [LR](T)[sP] · |
| | [dR](G)[sP] · [LR](G)[sP] · [dR](C)[sP] · [dR](C)[sP] · [LR](A)[sP] · [dR](G)[sP] · |
| | [dR](G)[sP] · [LR](G)[sP] · [dR](A)[sP] · [dR](T)[sP] · [LR]([5meC])[sP] · [LR](A) |
| SEQ ID 235 | [LR](T)[sP] · [dR](T)[sP] · [dR](C)[sP] · [LR]([5meC])[sP] · [dR](A)[sP] · [LR](T)[sP] · |
| | [dR](T)[sP] · [dR](G)[sP] · [LR](G)[sP] · [dR](C)[sP] · [dR](C)[sP] · [LR](A)[sP] · |
| | [dR](G)[sP] · [dR](G)[sP] · [LR](G)[sP] · [dR](A)[sP] · [LR](T)[sP] · [LR]([5meC] |
| SEQ ID 236 | [LR](T)[sP] · [dR](T)[sP] · [LR](T)[sP] · [dR](C)[sP] · [dR](C)[sP] · [LR](A)[sP] · |
| | [dR](T)[sP] · [dR](T)[sP] · [LR](G)[sP] · [dR](G)[sP] · [dR](C)[sP] · [LR]([5meC])[sP] · |
| | [dR](A)[sP] · [LR](G)[sP] · [dR](G)[sP] · [dR](G)[sP] · [LR](A)[sP] · [LR](T) |
| SEQ ID 237 | [LR](G)[sP] · [dR](T)[sP] · [dR](T)[sP] · [LR](T)[sP] · [dR](C)[sP] · [dR](C)[sP] · |
| | [LR](A)[sP] · [dR](T)[sP] · [LR](T)[sP] · [dR](G)[sP] · [LR](G)[sP] · [dR](C)[sP] · |
| | [dR](C)[sP] · [LR](A)[sP] · [dR](G)[sP] · [dR](G)[sP] · [LR](G)[sP] · [LR](A) |
| SEQ ID 238 | [LR](A)[sP] · [dR](G)[sP] · [LR](T)[sP] · [dR](T)[sP] · [LR](T)[sP] · [dR](C)[sP] · |
| | [dR](C)[sP] · [LR](A)[sP] · [dR](T)[sP] · [dR](T)[sP] · [LR](G)[sP] · [dR](G)[sP] · |
| | [dR](C)[sP] · [LR]([5meC])[sP] · [dR](A)[sP] · [dR](G)[sP] · [LR](G)[sP] · [LR](G) |
| SEQ ID 239 | [LR]([5meC])[sP] · [dR](A)[sP] · [dR](G)[sP] · [LR](T)[sP] · [dR](T)[sP] · [LR](T)[sP] · |
| | [dR](C)[sP] · [dR](C)[sP] · [LR](A)[sP] · [dR](T)[sP] · [dR](T)[sP] · [LR](G)[sP] · |
| | [dR](G)[sP] · [dR](C)[sP] · [LR]([5meC])[sP] · [dR](A)[sP] · [LR](G)[sP] · [LR](G) |
| SEQ ID 240 | [LR](T)[sP] · [dR](C)[sP] · [LR](A)[sP] · [dR](G)[sP] · [dR](T)[sP] · [LR](T)[sP] · |
| | [dR](T)[sP] · [dR](C)[sP] · [LR]([5meC])[sP] · [dR](A)[sP] · [LR](T)[sP] · [dR](T)[sP] · |
| | [dR](G)[sP] · [LR](G)[sP] · [dR](C)[sP] · [dR](C)[sP] · [LR](A)[sP] · [LR](G) |
| SEQ ID 241 | [LR]([5meC])[sP] · [dR](T)[sP] · [dR](C)[sP] · [LR](A)[sP] · [dR](G)[sP] · [LR](T)[sP] · |
| | [dR](T)[sP] · [LR](T)[sP] · [dR](C)[sP] · [dR](C)[sP] · [LR](A)[sP] · [dR](T)[sP] · |
| | [dR](T)[sP] · [LR](G)[sP] · [dR](G)[sP] · [dR](C)[sP] · [LR]([5meC])[sP] · [LR](A) |
| SEQ ID 242 | [LR]([5meC])[sP] · [dR](C)[sP] · [dR](T)[sP] · [LR]([5meC])[sP] · [dR](A)[sP] · [dR](G)[sP] · |
| | [LR](T)[sP] · [dR](T)[sP] · [LR](T)[sP] · [dR](C)[sP] · [dR](C)[sP] · [LR](A)[sP] · |
| | [dR](T)[sP] · [LR](T)[sP] · [dR](G)[sP] · [dR](G)[sP] · [LR]([5meC])[sP] · [LR]([5meC] |
| SEQ ID 243 | [LR](A)[sP] · [dR](C)[sP] · [dR](C)[sP] · [LR](T)[sP] · [dR](C)[sP] · [LR](A)[sP] · |
| | [dR](G)[sP] · [dR](T)[sP] · [LR](T)[sP] · [dR](T)[sP] · [dR](C)[sP] · [LR]([5meC])[sP] · |
| | [dR](A)[sP] · [LR](T)[sP] · [dR](T)[sP] · [dR](G)[sP] · [LR](G)[sP] · [LR]([5meC] |
| SEQ ID 244 | [LR](T)[sP] · [dR](A)[sP] · [dR](C)[sP] · [LR]([5meC])[sP] · [dR](T)[sP] · [dR](C)[sP] · |
| | [LR](A)[sP] · [dR](G)[sP] · [LR](T)[sP] · [dR](T)[sP] · [LR](T)[sP] · [dR](C)[sP] · |
| | [dR](C)[sP] · [LR](A)[sP] · [dR](T)[sP] · [dR](T)[sP] · [LR](G)[sP] · [LR](G) |
| SEQ ID 245 | [LR]([5meC])[sP] · [dR](T)[sP] · [LR](A)[sP] · [dR](C)[sP] · [dR](C)[sP] · [LR](T)[sP] · |
| | [dR](C)[sP] · [dR](A)[sP] · [LR](G)[sP] · [dR](T)[sP] · [dR](T)[sP] · [LR](T)[sP] · |
| | [dR](C)[sP] · [dR](C)[sP] · [LR](A)[sP] · [dR](T)[sP] · [LR](T)[sP] · [LR](G) |
| SEQ ID 246 | [LR]([5meC])[sP] · [dR](C)[sP] · [dR](T)[sP] · [LR](A)[sP] · [dR](C)[P] · [dR](C)[sP] · |
| | [LR](T)[sP] · [dR](C)[sP] · [LR](A)[sP] · [dR](G)[P] · [dR](T)[sP] · [LR](T)[sP] · |
| | [dR](T)[sP] · [dR](C)[sP] · [LR]([5meC])[sP] · [dR](A)[sP] · [LR](T)[sP] · [LR](T) |
| SEQ ID 247 | [LR](T)[sP] · [dR](G)[sP] · [dR](C)[sP] · [LR](A)[sP] · [dR](G)[sP] · [dR](A)[sP] · |
| | [LR](G)[sP] · [dR](T)[sP] · [dR](C)[sP] · [LR](T)[sP] · [dR](T)[sP] · [dR](C)[sP] · |
| | [LR](A)[sP] · [dR](G)[sP] · [dR](T)[sP] · [dR](A)[sP] · [LR]([5meC])[sP] · [LR](T) |
| SEQ ID 248 | [LR](G)[sP] · [dR](G)[sP] · [dR](C)[sP] · [dR](T)[sP] · [LR](G)[sP] · [dR](C)[sP] · |
| | [dR](A)[sP] · [dR](G)[sP] · [LR](A)[sP] · [dR](G)[sP] · [dR](T)[sP] · [dR](C)[sP] · |
| | [LR](T)[sP] · [dR](T)[sP] · [dR](C)[sP] · [dR](A)[sP] · [LR](G)[sP] · [LR](T) |
| SEQ ID 249 | [LR](G)[sP] · [dR](A)[sP] · [dR](G)[sP] · [dR](G)[sP] · [LR](G)[sP] · [dR](C)[sP] · |
| | [dR](T)[sP] · [LR](G)[sP] · [dR](C)[sP] · [LR](A)[sP] · [dR](G)[sP] · [dR](A)[sP] · |
| | [dR](G)[sP] · [LR](T)[sP] · [dR](C)[sP] · [dR](T)[sP] · [LR](T)[sP] · [LR]([5meC] |
| SEQ ID 250 | [LR]([5meC])[sP] · [dR](C)[sP] · [dR](C)[sP] · [LR](G)[sP] · [dR](A)[sP] · [dR](G)[sP] · |
| | [dR](G)[sP] · [LR](G)[sP] · [dR](C)[sP] · [dR](T)[sP] · [LR](G)[sP] · [dR](C)[sP] · |
| | [LR](A)[sP] · [dR](G)[sP] · [dR](A)[sP] · [dR](C)[sP] · [LR](T)[sP] · [LR]([5meC] |
| SEQ ID 251 | [LR](G)[sP] · [dR](G)[sP] · [dR](T)[sP] · [dR](C)[sP] · [LR]([5meC])[sP] · [dR](C)[sP] · |
| | [LR](G)[sP] · [dR](A)[sP] · [dR](G)[sP] · [dR](G)[sP] · [LR](G)[sP] · [dR](C)[sP] · |
| | [dR](T)[sP] · [LR](G)[sP] · [dR](C)[sP] · [dR](A)[sP] · [LR](G)[sP] · [LR](A) |
| SEQ ID 252 | [LR](T)[sP] · [dR](G)[sP] · [dR](G)[sP] · [dR](G)[sP] · [LR](G)[sP] · [dR](T)[sP] · |
| | [dR](C)[sP] · [LR]([5meC])[sP] · [dR](C)[sP] · [LR](G)[sP] · [dR](A)[sP] · [dR](G)[sP] · |
| | [dR](G)[sP] · [LR](G)[sP] · [dR](C)[sP] · [dR](T)[sP] · [LR](G)[sP] · [LR]([5meC] |
| SEQ ID 253 | [LR](G)[sP] · [dR](A)[sP] · [dR](G)[sP] · [dR](T)[sP] · [LR](G)[sP] · [dR](G)[sP] · |
| | [dR](G)[sP] · [dR](G)[sP] · [LR](T)[sP] · [dR](C)[sP] · [dR](C)[sP] · [dR](C)[sP] · |
| | [LR](G)[sP] · [dR](A)[sP] · [dR](G)[sP] · [dR](G)[sP] · [LR](G)[sP] · [LR]([5meC] |
| SEQ ID 254 | [LR](T)[sP] · [dR](C)[sP] · [dR](C)[sP] · [LR](G)[sP] · [dR](A)[sP] · [dR](G)[sP] · |
| | [dR](T)[sP] · [LR](G)[sP] · [dR](G)[sP] · [dR](G)[sP] · [dR](G)[sP] · [LR](T)[sP] · |
| | [dR](C)[sP] · [dR](C)[sP] · [LR]([5meC])[sP] · [dR](G)[sP] · [LR](A)[sP] · [LR](A) |
| SEQ ID 255 | [LR]([5meC])[sP] · [dR](C)[sP] · [dR](C)[sP] · [LR](T)[sP] · [dR](C)[sP] · [dR](C)[sP] · |
| | [LR](G)[sP] · [dR](A)[sP] · [dR](G)[sP] · [dR](T)[sP] · [LR](G)[sP] · [dR](G)[sP] · |
| | [dR](G)[sP] · [dR](G)[sP] · [LR](T)[sP] · [dR](C)[sP] · [LR]([5meC])[sP] · [LR]([5meC] |
| SEQ ID 256 | [LR](G)[sP] · [dR](C)[sP] · [LR](A)[sP] · [dR](C)[sP] · [dR](C)[sP] · [dR](C)[sP] · |
| | [LR](T)[sP] · [dR](C)[sP] · [dR](C)[sP] · [LR](G)[sP] · [dR](A)[sP] · [dR](G)[sP] · |
| | [dR](T)[sP] · [LR](G)[sP] · [dR](G)[sP] · [dR](G)[sP] · [LR](G)[sP] · [LR](T) |
| SEQ ID 257 | [LR](A)[sP] · [dR](G)[sP] · [dR](G)[sP] · [LR](G)[sP] · [dR](C)[sP] · [LR](A)[sP] · |
| | [dR](C)[sP] · [dR](C)[sP] · [dR](C)[sP] · [LR](T)[sP] · [dR](C)[sP] · [dR](C)[sP] · |
| | [LR](G)[sP] · [dR](A)[sP] · [dR](G)[sP] · [dR](T)[sP] · [LR](G)[sP] · [LR](G) |
| SEQ ID 258 | [LR]([5meC])[sP] · [dR](A)[sP] · [dR](G)[sP] · [dR](A)[sP] · [LR](G)[sP] · [dR](G)[sP] · |
| | [dR](G)[sP] · [dR](C)[sP] · [LR](A)[sP] · [dR](C)[sP] · [dR](C)[sP] · [dR](C)[sP] · |
| | [LR](T)[sP] · [dR](C)[sP] · [dR]([5meC])[sP] · [dR](G)[sP] · [LR](A)[sP] · [LR](G) |
| SEQ ID 259 | [LR](G)[sP] · [dR](A)[sP] · [dR](G)[sP] · [dR](C)[sP] · [LR](A)[sP] · [dR](G)[sP] · |
| | [dR](A)[sP] · [dR](G)[sP] · [LR](G)[sP] · [dR](G)[sP] · [dR](C)[sP] · [dR](A)[sP] · |
| | [LR]([5meC])[sP] · [dR](C)[sP] · [dR](C)[sP] · [dR](T)[sP] · [LR]([5meC])[sP] · [LR]([5meC] |
| SEQ ID 260 | [LR]([5meC])[sP] · [dR](C)[sP] · [dR](T)[sP] · [LR](G)[sP] · [dR](A)[sP] · [dR](G)[sP] · |
| | [dR](C)[sP] · [LR](A)[sP] · [dR](G)[sP] · [dR](A)[sP] · [LR](G)[sP] · [dR](G)[sP] · |
| | [dR](G)[sP] · [dR](C)[sP] · [LR](A)[sP] · [dR](C)[sP] · [LR]([5meC])[sP] · [LR]([5meC] |
| SEQ ID 261 | [LR](A)[sP] · [dR](G)[sP] · [dR](G)[sP] · [dR](C)[sP] · [LR]([5meC])[sP] · [dR](T)[sP] · |
| | [LR](G)[sP] · [dR](A)[sP] · [dR](G)[sP] · [dR](C)[sP] · [LR](A)[sP] · [dR](G)[sP] · |
| | [LR](A)[sP] · [dR](G)[sP] · [dR](G)[sP] · [dR](G)[sP] · [LR]([5meC])[sP] · [LR](A) |
| SEQ ID 262 | [LR](G)[sP] · [dR](G)[sP] · [LR](G)[sP] · [dR](A)[sP] · [dR](G)[sP] · [LR](G)[sP] · |
| | [dR](C)[sP] · [dR](C)[sP] · [dR](T)[sP] · [LR](G)[sP] · [dR](A)[sP] · [dR](G)[sP] · |
| | [dR](C)[sP] · [LR](A)[sP] · [dR](G)[sP] · [dR](A)[sP] · [LR](G)[sP] · [LR](G) |
| SEQ ID 263 | [LR]([5meC])[sP] · [dR](T)[sP] · [LR](A)[sP] · [dR](G)[sP] · [dR](G)[sP] · [LR](G)[sP] · |
| | [dR](A)[sP] · [dR](G)[sP] · [LR](G)[sP] · [dR](C)[sP] · [dR](C)[sP] · [dR](T)[sP] · |
| | [LR](G)[sP] · [dR](A)[sP] · [dR](G)[sP] · [dR](C)[sP] · [LR](A)[sP] · [LR](G) |
| SEQ ID 264 | [LR](G)[sP] · [dR](T)[sP] · [LR](G)[sP] · [dR](C)[sP] · [dR](T)[sP] · [LR](A)[sP] · |
| | [dR](G)[sP] · [dR](G)[sP] · [LR](G)[sP] · [dR](A)[sP] · [dR](G)[sP] · [dR](G)[sP] · |
| | [LR]([5meC])[sP] · [dR](C)[sP] · [dR](T)[sP] · [dR](G)[sP] · [LR](A)[sP] · [LR](G) |
| SEQ ID 265 | [LR](G)[sP] · [dR](A)[sP] · [dR](G)[sP] · [dR](G)[sP] · [LR](T)[sP] · [dR](G)[sP] · |
| | [dR](C)[sP] · [dR](T)[sP] · [LR](A)[sP] · [dR](G)[sP] · [dR](G)[sP] · [dR](G)[sP] · |
| | [LR](A)[sP] · [dR](G)[sP] · [dR](G)[sP] · [dR](C)[sP] · [LR]([5meC])[sP] · [LR](T) |
| SEQ ID 266 | [LR](G)[sP] · [dR](G)[sP] · [dR](G)[sP] · [dR](G)[sP] · [LR](A)[sP] · [dR](G)[sP] · |
| | [dR](G)[sP] · [dR](T)[sP] · [LR](G)[sP] · [dR](C)[sP] · [dR](T)[sP] · [LR](A)[sP] · |
| | [dR](G)[sP] · [dR](G)[sP] · [LR](G)[sP] · [dR](A)[sP] · [LR](G)[sP] · [LR](G) |
| SEQ ID 267 | [LR](T)[sP] · [dR](A)[sP] · [dR](G)[sP] · [LR](G)[sP] · [dR](G)[sP] · [dR](G)[sP] · |
| | [dR](G)[sP] · [LR](A)[sP] · [dR](G)[sP] · [dR](G)[sP] · [dR](T)[sP] · [LR](G)[sP] · |
| | [dR](C)[sP] · [dR](T)[sP] · [LR](A)[sP] · [dR](G)[sP] · [LR](G)[sP] · [LR](G) |
| SEQ ID 268 | [LR](G)[sP] · [dR](G)[sP] · [dR](T)[sP] · [dR](T)[sP] · [LR](A)[sP] · [dR](G)[sP] · |
| | [dR](G)[sP] · [dR](G)[sP] · [LR](G)[sP] · [dR](G)[sP] · [dR](A)[sP] · [dR](G)[sP] · |
| | [LR](G)[sP] · [dR](T)[sP] · [dR](G)[sP] · [dR](C)[sP] · [LR](T)[sP] · [LR](A) |
| SEQ ID 269 | [LR](T)[sP] · [dR](T)[sP] · [dR](T)[sP] · [dR](G)[sP] · [LR](G)[sP] · [dR](T)[sP] · |
| | [dR](T)[sP] · [dR](A)[sP] · [LR](G)[sP] · [dR](G)[sP] · [dR](G)[sP] · [dR](G)[sP] · |
| | [LR](G)[sP] · [dR](A)[sP] · [dR](G)[sP] · [dR](G)[sP] · [LR](T)[sP] · [LR](G) |
| SEQ ID 270 | [LR](G)[sP] · [dR](A)[sP] · [LR](A)[sP] · [dR](T)[sP] · [LR](T)[sP] · [dR](T)[sP] · |
| | [dR](G)[sP] · [dR](G)[sP] · [LR](T)[sP] · [LR](T)[sP] · [dR](A)[sP] · [dR](G)[sP] · |
| | [LR](G)[sP] · [dR](G)[sP] · [dR](G)[sP] · [dR](G)[sP] · [LR](A)[sP] · [LR](G) |
| SEQ ID 271 | [LR](G)[sP] · [dR](G)[sP] · [dR](A)[sP] · [LR](G)[sP] · [dR](A)[sP] · [LR](A)[sP] · |
| | [dR](T)[sP] · [LR](T)[sP] · [dR](T)[sP] · [LR](G)[sP] · [dR](G)[sP] · [dR](T)[sP] · |
| | [dR](T)[sP] · [LR](A)[sP] · [dR](G)[sP] · [dR](G)[sP] · [LR](G)[sP] · [LR](G) |
| SEQ ID 272 | [LR]([5meC])[sP] · [LR](A)[sP] · [dR](G)[sP] · [LR](G)[sP] · [dR](G)[sP] · [dR](A)[sP] · |
| | [dR](G)[sP] · [LR](A)[sP] · [LR](A)[sP] · [dR](T)[sP] · [dR](T)[sP] · [LR](T)[sP] · |
| | [dR](G)[sP] · [dR](G)[sP] · [LR](T)[sP] · [dR](T)[sP] · [LR](A)[sP] · [LR](G) |
| SEQ ID 273 | [LR](G)[sP] · [dR](T)[sP] · [dR](C)[sP] · [dR](C)[sP] · [LR](A)[sP] · [dR](G)[sP] · |
| | [dR](G)[sP] · [LR](G)[sP] · [dR](A)[sP] · [dR](G)[sP] · [dR](A)[sP] · [LR](G)[sP] · |
| | [dR](T)[sP] · [LR](T)[sP] · [dR](T)[sP] · [dR](G)[sP] · [LR](G)[sP] · [LR](T) |
| SEQ ID 274 | [LR](G)[sP] · [dR](G)[sP] · [dR](G)[sP] · [dR](G)[sP] · [LR](T)[sP] · [dR](C)[sP] · |
| | [dR](C)[sP] · [LR](A)[sP] · [dR](G)[sP] · [dR](G) [sP] · [LR](G)[sP] · [dR](A)[sP] · |
| | [dR](G)[sP] · [dR](A)[sP] · [LR](A)[sP] · [dR](T)[sP] · [LR](T)[sP] · [LR](T) |
| SEQ ID 275 | [LR](A)[sP] · [dR](A)[sP] · [dR](T)[sP] · [LR](G)[sP] · [dR](G)[sP] · [dR](G)[sP] · |
| | [dR](G)[sP] · [LR](T)[sP] · [dR](C)[sP] · [dR](C)[sP] · [LR](A)[sP] · [dR](G)[sP] · |
| | [dR](G)[sP] · [LR](G)[sP] · [dR](A)[sP] · [dR](G)[sP] · [LR](A)[sP] · [LR](A) |
| SEQ ID 276 | [LR]([5meC])[sP] · [dR](A)[sP] · [dR](G)[sP] · [dR](A)[sP] · [LR](A)[sP] · [dR](T)[sP] · |
| | [dR](G)[sP] · [dR](G)[sP] · [LR](G)[sP] · [dR](G)[sP] · [dR](T)[sP] · [dR](C)[sP] · |
| | [LR]([5meC])[sP] · [dR](A)[sP] · [dR](G)[sP] · [dR](G)[sP] · [LR](G)[sP] · [LR](A) |
| SEQ ID 277 | [LR](G)[sP] · [dR](C)[sP] · [dR](T)[sP] · [dR](C)[sP] · [LR](A)[sP] · [dR](G)[sP] · |
| | [dR](A)[sP] · [dR](A)[sP] · [LR](T)[sP] · [dR](G)[sP] · [dR](G)[sP] · [dR](G)[sP] · |
| | [LR](G)[sP] · [dR](T)[sP] · [dR](C)[sP] · [dR](C)[sP] · [LR](A)[sP] · [LR](G |
| SEQ ID 278 | [LR](G)[sP] · [dR](G)[sP] · [dR](A)[sP] · [LR](G)[sP] · [dR](C)[sP] · [dR](T)[sP] · |
| | [dR](C)[sP] · [LR](A)[sP] · [dR](G)[sP] · [dR](A)[sP] · [LR](A)[sP] · [dR](T)[sP] · |
| | [LR](G)[sP] · [dR](G)[sP] · [dR](G)[sP] · [dR](G)[sP] · [LR](T)[sP] · [LR]([5meC] |
| SEQ ID 279 | [LR](T)[sP] · [dR](G)[sP] · [dR](G)[sP] · [dR](G)[sP] · [LR](G)[sP] · [dR](A)[sP] · |
| | [dR](G)[sP] · [dR](C)[sP] · [LR](T)[sP] · [dR](C)[sP] · [dR](A)[sP] · [dR](G)[sP] · |
| | [LR](A)[sP] · [dR](A)[sP] · [dR](T)[sP] · [dR](G)[sP] · [LR](G)[sP] · [LR](G) |
| SEQ ID 280 | [LR](T)[sP] · [dR](G)[sP] · [LR](A)[sP] · [dR](T)[sP] · [dR](G)[sP] · [LR](G)[sP] · |
| | [dR](G)[sP] · [dR](G)[sP] · [dR](A)[sP] · [LR](G)[sP] · [dR](C)[sP] · [dR](T)[sP] · |
| | [dR](C)[sP] · [LR](A)[sP] · [dR](G)[sP] · [dR](A)[sP] · [LR](A)[sP] · [LR](T) |
| SEQ ID 281 | [LR](T)[sP] · [dR](G)[sP] · [dR](G)[sP] · [dR](T)[sP] · [LR](G)[sP] · [dR](A)[sP] · |
| | [dR](T)[sP] · [LR](G)[sP] · [dR](G)[sP] · [dR](G)[sP] · [LR](G)[sP] · [dR](A)[sP] · |
| | [dR](G)[sP] · [dR](C)[sP] · [LR](T)[sP] · [dR](C)[sP] · [LR](A)[sP] · [LR](G) |
| SEQ ID 282 | [LR]([5meC])[sP] · [dR](C)[sP] · [dR](A)[sP] · [dR](T)[sP] · [LR](G)[sP] · [dR](G)[sP] · |
| | [dR](T)[sP] · [LR](G)[sP] · [dR](A)[sP] · [dR](T)[sP] · [LR](G)[sP] · [dR](G)[sP] · |
| | [dR](G)[sP] · [LR](G)[sP] · [dR](A)[sP] · [dR](G)[sP] · [LR]([5meC])[sP] · [LR](T) |
| SEQ ID 283 | [LR]([5meC])[sP] · [dR](T)[sP] · [dR](C)[sP] · [dR](C)[sP] · [LR]([5meC])[sP] · |
| | [dR](A)[sP] · [dR](T)[sP] · [LR](G)[sP] · [dR](G)[sP] · [dR](T)[sP] · [LR](G)[sP] · |
| | [dR](A)[sP] · [dR](T)[sP] · [LR](G)[sP] · [dR](G)[sP] · [dR](G)[sP] · [LR](G)[sP] · [LR](A) |
| SEQ ID 284 | [LR]([5meC])[sP] · [dR](A)[sP] · [dR](C)[sP] · [dR](C)[sP] · [LR](T)[sP] · [dR](C)[sP] · |
| | [dR](C)[sP] · [dR](C)[sP] · [LR](A)[sP] · [dR](T)[sP] · [LR](G)[sP] · [dR](G)[sP] · |
| | [dR](T)[sP] · [LR](G)[sP] · [dR](A)[sP] · [dR](T)[sP] · [LR](G)[sP] · [LR](G) |
| SEQ ID 285 | [LR]([5meC])[sP] · [dR](C)[sP] · [dR](C)[sP] · [dR](C)[sP] · [LR](A)[sP] · [dR](C)[sP] · |
| | [dR](C)[sP] · [LR](T)[sP] · [dR](C)[sP] · [dR](C)[sP] · [dR](C)[sP] · [LR](A)[sP] · |
| | [dR](T)[sP] · [LR](G)[sP] · [dR](G)[sP] · [dR](T)[sP] · [LR](G)[sP] · [LR](A) |
| SEQ ID 286 | [LR](A)[sP] · [dR](G)[sP] · [dR](G)[sP] · [dR](C)[sP] · [LR]([5meC])[sP] · [dR](C)[sP] · |
| | [dR](C)[sP] · [LR](A)[sP] · [dR](C)[sP] · [dR](C)[sP] · [LR](T)[sP] · [dR](C)[sP] · |
| | [dR](C)[sP] · [dR](C)[sP] · [LR](A)[sP] · [dR](T)[sP] · [LR](G)[sP] · [LR](G) |
| SEQ ID 287 | [LR](T)[sP] · [dR](T)[sP] · [LR](G)[sP] · [dR](A)[sP] · [dR](G)[sP] · [dR](G)[sP] · |
| | [LR]([5meC])[sP] · [dR](C)[sP] · [dR](C)[sP] · [dR](C)[sP] · [LR](A)[sP] · [dR](C)[sP] · |
| | [dR](C)[sP] · [LR](T)[sP] · [dR](C)[sP] · [dR](C)[sP] · [LR]([5meC])[sP] · [LR](A) |
| SEQ ID 288 | [LR](A)[sP] · [dR](G)[sP] · [dR](A)[sP] · [LR](T)[sP] · [dR](T)[sP] · [LR](G)[sP] · |
| | [dR](A)[sP] · [dR](G)[sP] · [dR](G)[sP] · [LR]([5meC])[sP] · [dR](C)[sP] · [dR](C)[sP] · |
| | [dR](C)[sP] · [LR](A)[sP] · [dR](C)[sP] · [dR](C)[sP] · [LR](T)[sP] · [LR]([5meC] |
| SEQ ID 289 | [LR]([5meC])[sP] · [dR](T)[sP] · [dR](T)[sP] · [dR](A)[sP] · [LR](G)[sP] · [dR](A)[sP] · |
| | [dR](T)[sP] · [dR](T)[sP] · [LR](G)[sP] · [dR](A)[sP] · [dR](G)[sP] · [dR](G)[sP] · |
| | [LR]([5meC])[sP] · [dR](C)[sP] · [dR](C)[sP] · [dR](C)[sP] · [LR](A)[sP] · [LR]([5meC] |
| SEQ ID 290 | [LR](G)[sP] · [dR](G)[sP] · [dR](C)[sP] · [dR](C)[sP] · [LR](T)[sP] · [dR](T)[sP] · |
| | [dR](A)[sP] · [dR](G)[sP] · [LR](A)[sP] · [dR](T)[sP] · [dR](T)[sP] · [dR](G)[sP] · |
| | [LR](A)[sP] · [dR](G)[sP] · [dR](G)[sP] · [dR](C)[sP] · [LR]([5meC])[sP] · [LR]([5meC] |
| SEQ ID 291 | [LR](G)[sP] · [dR](A)[sP] · [LR](A)[sP] · [dR](G)[sP] · [LR](G)[sP] · [dR](C)[sP] · |
| | [dR](C)[sP] · [dR](T)[sP] · [LR](T)[sP] · [dR](A)[sP] · [dR](G)[sP] · [dR](A)[sP] · |
| | [LR](T)[sP] · [dR](T)[sP] · [LR](G)[sP] · [dR](A)[sP] · [LR](G)[sP] · [LR](G) |
| SEQ ID 292 | [LR](A)[sP] · [dR](G)[sP] · [dR](G)[sP] · [LR](G)[sP] · [dR](A)[sP] · [dR](A)[sP] · |
| | [dR](G)[sP] · [LR](G)[sP] · [dR](C)[sP] · [dR](C)[sP] · [dR](T)[sP] · [LRP(T)[sP] · |
| | [dR](A)[sP] · [dR](G)[sP] · [LR](A)[sP] · [dR](T)[sP] · [LR](T)[sP] · [LR](G) |
| SEQ ID 293 | [LR](G)[sP] · [dR](A)[sP] · [dR](C)[sP] · [LR](A)[sP] · [dR](G)[sP] · [dR](G)[sP] · |
| | [dR](G)[sP] · [LR](A)[sP] · [dR](A)[sP] · [dR](G)[sP] · [LR](G)[sP] · [dR](C)[sP] · |
| | [dR](C)[sP] · [LR](T)[sP] · [dR](T)[sP] · [dR](A)[sP] · [LR](G)[sP] · [LR](A) |
| SEQ ID 294 | [LR](T)[sP] · [dR](C)[sP] · [dR](T)[sP] · [LR](G)[sP] · [dR](A)[sP] · [dR](C)[sP] · |
| | [LR](A)[sP] · [dR](G)[sP] · [dR](G)[sP] · [dR](G)[sP] · [LR](A)[sP] · [dR](A)[sP] · |
| | [dR](G)[sP] · [LR](G)[sP] · [dR](C)[sP] · [dR](C)[sP] · [LR](T)[sP] · [LR](T) |
| SEQ ID 295 | [LR]([5meC])[sP] · [dR](C)[sP] · [dR](T)[sP] · [LR](T)[sP] · [dR](C)[sP] · [dR](T)[sP] · |
| | [LR](G)[sP] · [dR](A)[sP] · [dR](C)[sP] · [LR](A)[sP] · [dR](G)[sP] · [dR](G)[sP] · |
| | [dR](G)[sP] · [LR](A)[sP] · [dR](A)[sP] · [dR](G)[sP] · [LR](G)[sP] · [LR]([5meC] |
| SEQ ID 296 | [LR]([5meC])[sP] · [dR](C)[sP] · [LR]([5meC])[sP] · [dR](C)[sP] · [dR](C)[sP] · |
| | [dR](T)[sP] · [LR](T)[sP] · [dR](C)[sP] · [dR](T)[sP] · [LR](G)[sP] · [dR](A)[sP] · |
| | [dR](C)[sP] · [LR](A)[sP] · [dR](G)[sP] · [dR](G)[sP] · [dR](G)[sP] · [LR](A)[sP] · [LR](A) |
| SEQ ID 297 | [LR]([5meC])[sP] · [dR](A)[sP] · [dR](A)[sP] · [dR](C)[sP] · [LR]([5meC])[sP] · |
| | [dR](C)[sP] · [dR](C)[sP] · [dR](C)[sP] · [LR](T)[sP] · [dR](T)[sP] · [dR](C)[sP] · |
| | [dR](T)[sP] · [LR](G)[sP] · [dR](A)[sP] · [dR](C)[sP] · [dR](A)[sP] · [LR](G)[sP] · [LR](G) |
| SEQ ID 298 | [LR]([5meC])[sP] · [dR](C)[sP] · [dR](A)[sP] · [dR](C)[sP] · [LR](A)[sP] · [dR](A)[sP] · |
| | [dR](C)[sP] · [dR](C)[sP] · [LR]([5meC])[sP] · [dR](C)[sP] · [dR](C)[sP] · [dR](T)[sP] · |
| | [LR](T)[sP] · [dR](C)[sP] · [dR](T)[sP] · [dR](G)[sP] · [LR](A)[sP] · [LR]([5meC] |
| SEQ ID 299 | [LR](T)[sP] · [dR](T)[sP] · [LR](G)[sP] · [dR](C)[sP] · [dR](C)[sP] · [LR](A)[sP] · |
| | [dR](C)[sP] · [dR](A)[sP] · [LR](A)[sP] · [dR](C)[sP] · [dR](C)[sP] · [dR](A)[sP] · |
| | [LR]([5meC])[sP] · [dR](C)[sP] · [dR](T)[sP] · [dR](T)[sP] · [LR]([5meC])[sP] · [LR](T) |
| SEQ ID 300 | [LR]([5meC])[sP] · [dR](T)[sP] · [LR](T)[sP] · [dR](T)[sP] · [dR](T)[sP] · [LR](G)[sP] · |
| | [dR](C)[sP] · [dR](C)[sP] · [LR](A)[sP] · [dR](C)[sP] · [LR](A)[sP] · [dR](A)[sP] · |
| | [dR](C)[sP] · [LR]([5meC])[sP] · [dR](C)[sP] · [dR](C)[sP] · [LR]([5meC])[sP] · [LR](T) |
| SEQ ID 301 | [LR](T)[sP] · [dR](G)[sP] · [dR](G)[sP] · [dR](C)[sP] · [LR](T)[sP] · [dR](T)[sP] · |
| | [dR](T)[sP] · [dR](T)[sP] · [LR](G)[sP] · [dR](C)[sP] · [dR](C)[sP] · [LR](A)[sP] · |
| | [dR](C)[sP] · [LR](A)[sP] · [dR](A)[sP] · [dR](C)[sP] · [LR]([5meC])[sP] · [LR]([5meC] |
| SEQ ID 302 | [LR](A)[sP] · [dR](T)[sP] · [LR](G)[sP] · [dR](T)[sP] · [LR](G)[sP] · [dR](G)[sP] · |
| | [LR]([5meC])[sP] · [dR](T)[sP] · [dR](T)[sP] · [LR](T)[sP] · [dR](T)[sP] · [dR](G)[sP] · |
| | [dR](C)[sP] · [LR]([5meC])[sP] · [dR](A)[sP] · [dR](C)[sP] · [LR](A)[sP] · [LR](A) |
| SEQ ID 303 | [LR](G)[sP] · [dR](T)[sP] · [LR](A)[sP] · [dR](A)[sP] · [dR](T)[sP] · [LR](G)[sP] · |
| | [dR](T)[sP] · [dR](G)[sP] · [LR](G)[sP] · [dR](C)[sP] · [dR](T)[sP] · [dR](T)[sP] · |
| | [LR](T)[sP] · [dR](T)[sP] · [dR](G)[sP] · [dR](C)[sP] · [LR]([5meC])[sP] · [LR](A) |
| SEQ ID 304 | [LR]([5meC])[sP] · [dR](T)[sP] · [dR](T)[sP] · [dR](G)[sP] · [LR](T)[sP] · [dR](A)[sP] · |
| | [dR](A)[sP] · [LR](T)[sP] · [dR](G)[sP] · [LR](T)[sP] · [dR](G)[sP] · [LR](G)[sP] · |
| | [dR](C)[sP] · [dR](T)[sP] · [dR](T)[sP] · [LR](T)[sP] · [LR](T)[sP] · [LR](G) |
| SEQ ID 305 | [LR]([5meC])[sP] · [dR](A)[sP] · [LR](G)[sP] · [dR](C)[sP] · [LR](T)[sP] · [dR](T)[sP] · |
| | [LR](G)[sP] · [dR](T)[sP] · [LR](A)[sP] · [LR](A)[sP] · [dR](T)[sP] · [LR](G)[sP] · |
| | [dR](T)[sP] · [LR](G)[sP] · [dR](G)[sP] · [dR](C)[sP] · [LR](T)[sP] · [LR](T) |
| SEQ ID 306 | [LR](T)[sP] · [dR](G)[sP] · [dR](G)[sP] · [LR]([5meC])[sP] · [dR](A)[sP] · [dR](G)[sP] · |
| | [dR](C)[sP] · [LR](T)[sP] · [dR](T)[sP] · [LR](G)[sP] · [dR](T))[sP] · [LR](A)[sP] · |
| | [dR](A)[sP] · [dR](T)[sP] · [LR](G)[sP] · [dR](T)[sP] · [LR](G)[sP] · [LR](G) |
| SEQ ID 307 | [LR](G)[sP] · [dR](G)[sP] · [LR](A)[sP] · [dR](T)[sP] · [dR](G)[sP] · [LR](G)[sP] · |
| | [dR](C)[sP] · [dR](A)[sP] · [LR](G)[sP] · [dR](C)[sP] · [dR](T)[sP] · [dR](T)[sP] · |
| | [LR](G)[sP] · [dR](T)[sP] · [LR](A)[sP] · [dR](A)[sP] · [LR](T)[sP] · [LR](G) |
| SEQ ID 308 | [LR](A)[sP] · [dR](G)[sP] · [dR](G)[sP] · [dR](G)[sP] · [LR](G)[sP] · [dR](A)[sP] · |
| | [dR](T)[sP] · [LR](G)[sP] · [dR](G)[sP] · [dR](C)[sP] · [LR](A)[sP] · [dR](G)[sP] · |
| | [dR](C)[sP] · [LR](T)[sP] · [dR](T)[sP] · [dR](G)[sP] · [LR](T)[sP] · [LR](A) |
| SEQ ID 309 | [LR](G)[sP] · [dR](G)[sP] · [dR](G)[sP] · [dR](A)[sP] · [LR](G)[sP] · [dR](G)[sP] · |
| | [dR](G)[sP] · [dR](G)[sP] · [LR](A)[sP] · [dR](T)[sP] · [dR](G)[sP] · [dR](G)[sP] · |
| | [LR]([5meC])[sP] · [dR](A)[sP] · [dR](G)[sP] · [dR](C)[sP] · [LR](T)[sP] · [LR](T) |
| SEQ ID 310 | [LR](A)[sP] · [dR](C)[sP] · [LR](G)[sP] · [dR](G)[sP] · [dR](G)[sP] · [dR](G)[sP] · |
| | [LR](A)[sP] · [dR](G)[sP] · [dR](G)[sP] · [dR](G)[sP] · [LR](G)[sP] · [dR](A)[sP] · |
| | [dR](T)[sP] · [LR](G)[sP] · [dR](G)[sP] · [dR](C)[sP] · [LR](A)[sP] · [LR](G) |
| SEQ ID 311 | [LR](G)[sP] · [dR](A)[sP] · [LR](A)[sP] · [dR](A)[sP] · [dR](C)[sP] · [LR](G)[sP] · |
| | [dR](G)[sP] · [dR](G)[sP] · [dR](G)[sP] · [LR](A)[sP] · [dR](G)[sP] · [dR](G)[sP] · |
| | [dR](G)[sP] · [LR](G)[sP] · [dR](A)[sP] · [dR](T)[sP] · [LR](G)[sP] · [LR](G) |
| SEQ ID 312 | [LR](A)[sP] · [dR](C)[sP] · [dR](T)[sP] · [LR](G)[sP] · [dR](A)[sP] · [LR](A)[sP] · |
| | [dR](A)[sP] · [dR](C)[sP] · [LR](G)[sP] · [dR](G)[sP] · [dR](G)[sP] · [dR](G)[sP] · |
| | [LR](A)[sP] · [dR](G)[sP] · [dR](G)[sP] · [dR](G)[sP] · [LR](G)[sP] · [LR](A) |
| SEQ ID 313 | [LR](T)[sP] · [dR](C)[sP] · [dR](C)[sP] · [LR](A)[sP] · [dR](C)[sP] · [dR](T)[sP] · |
| | [LR](G)[sP] · [dR](A)[sP] · [dR](A)[sP] · [dR](A)[sP] · [LR]([5meC]) · [dR](G)[sP] · |
| | [dR](G)[sP] · [dR](G)[sP] · [LR](G)[sP] · [dR](A)[sP] · [dR](G)[sP] · [LR](G) |
| SEQ ID 314 | [LR](G)[sP] · [dR](G)[sP] · [dR](G)[sP] · [LR](T)[sP] · [dR](C)[sP] · [dR](C)[sP] · |
| | [LR](A)[sP] · [dR](C)[sP] · [dR](T)[sP] · [LR](G)[sP] · [dR](A)[sP] · [dR](A)[sP] · |
| | [LR](A)[sP] · [dR]([5meC])[sP] · [dR](G)[sP] · [dR](G)[sP] · [LR](G)[sP] · [LR](G) |
| SEQ ID 315 | [LR](A)[sP] · [dR](C)[sP] · [dR](A)[sP] · [LR](G)[sP] · [dR](G)[sP] · [LR](G)[sP] · |
| | [dR](T)[sP] · [dR](C)[sP] · [dR](C)[sP] · [LR](A)[sP] · [dR](C)[sP] · [dR](T)[sP] · |
| | [dR](G)[sP] · [LR](A)[sP] · [dR](A)[sP] · [dR](A)[sP] · [LR]([5meC])[sP] · [LR](G) |
| SEQ ID 316 | [LR](G)[sP] · [dR](C)[sP] · [dR](C)[sP] · [LR](A)[sP] · [dR](C)[sP] · [LR](A)[sP] · |
| | [dR](G)[sP] · [dR](G)[sP] · [dR](G)[sP] · [LR](T)[sP] · [dR](C)[sP] · [dR](C)[sP] · |
| | [LR](A)[sP] · [dR](C)[sP] · [dR](T)[sP] · [dR](G)[sP] · [LR](A)[sP] · [LR](A) |
| SEQ ID 317 | [LR]([5meC])[sP] · [dR](T)[sP] · [dR](G)[sP] · [dR](G)[sP] · [LR]([5meC])[sP] · [dR](C)[sP] · |
| | [dR](A)[sP] · [dR](C)[sP] · [LR](A)[sP] · [dR](G)[sP] · [dR](G)[sP] · [dR](G)[sP] · |
| | [LR](T)[sP] · [dR](C)[sP] · [dR](C)[sP] · [dR](A)[sP] · [LR]([5meC])[sP] · [LR](T) |
| SEQ ID 318 | [LR]([5meC])[sP] · [dR](A)[sP] · [dR](C)[sP] · [dR](C)[sP] · [LR](T)[sP] · [dR](G)[sP] · |
| | [dR](G)[sP] · [dR](C)[sP] · [LR]([5meC])[sP] · [dR](A)[sP] · [dR](C)[sP] · [dR](A)[sP] · |
| | [LR](G)[sP] · [dR](G)[sP] · [dR](G)[sP] · [dR](T)[sP] · [LR]([5meC])[sP] · [LR]([5meC] |
| SEQ ID 319 | [LR](A)[sP] · [dR](A)[sP] · [dR](G)[sP] · [dR](C)[sP] · [LR](A)[sP] · [dR](C)[sP] · |
| | [dR](C)[sP] · [dR](T)[sP] · [LR](G)[sP] · [dR](G)[sP] · [dR](C)[sP] · [dR](C)[sP] · |
| | [LR](A)[sP] · [dR](C)[sP] · [dR](A)[sP] · [dR](G)[sP] · [LR](G)[sP] · [LR](G) |
| SEQ ID 320 | [LR](G)[sP] · [dR](A)[sP] · [dR](A)[sP] · [LR](A)[sP] · [dR](A)[sP] · [dR](G)[sP] · |
| | [dR](C)[sP] · [LR](A)[sP] · [dR](C)[sP] · [dR](C)[sP] · [dR](C)[sP] · [LR](G)[sP] · |
| | [dR](G)[sP] · [dR](C)[sP] · [dR](C)[sP] · [LR](A)[sP] · [LR]([5meC])[sP] · [LR](A) |
| SEQ ID 321 | [LR](A)[sP] · [dR](G)[sP] · [dR](G)[sP] · [dR](G)[sP] · [LR](A)[sP] · [dR](A)[sP] · |
| | [LR](A)[sP] · [dR](A)[sP] · [dR](G)[sP] · [dR](C)[sP] · [LR](A)[sP] · [dR](C)[sP] |
| | [dR](C)[sP] · [dR](T)[sP] · [LR](G)[sP] · [dR](G)[sP] · [LR]([5meC])[sP] · [LR]([5meC] |
| SEQ ID 322 | [LR](G)[sP] · [dR](A)[sP] · [LR](T)[sP] · [dR](A)[sP] · [LR](G)[sP] · [dR](G)[sP] · |
| | [dR](G)[sP] · [LR](A)[sP] · [dR](A)[sP] · [LR](A)[sP] · [LR](A)[sP] · [dR](G)[sP] · |
| | [LR]([5meC])[sP] · [dR](A)[sP] · [dR](C)[sP] · [dR](C)[sP] · [LR](T)[sP] · [LR](G) |
| SEQ ID 323 | [LR](G)[sP] · [dR](T)[sP] · [dR](G)[sP] · [LR](G)[sP] · [LR](A)[sP] · [LR](T)[sP] · |
| | [dR](A)[sP] · [LR](G)[sP] · [dR](G)[sP] · [dR](G)[sP] · [dR](A)[sP] · [LR](A)[sP] · |
| | [LR](A)[sP] · [dR](A)[sP] · [dR](G)[sP] · [dR](C)[sP] · [LR]([A)[sP] · [LR]([5meC] |
| SEQ ID 324 | [LR]([5meC])[sP] · [dR](C)[sP] · [dR](T)[sP] · [LR](G)[sP] · [dR](T)[sP] · [dR](G)[sP] · |
| | [LR](G)[sP] · [dR](A)[sP] · [LR](T)[sP] · [dR](A)[sP] · [dR](G)[sP] · [LR](G)[sP] · |
| | [LR](G)[sP] · [dR](A)[sP] · [LR](A)[sP] · [dR](A)[sP] · [LR](A)[sP] · [LR](G) |
| SEQ ID 325 | [LR](A)[sP] · [dR](C)[sP] · [LR]([5meC])[sP] · [dR](C)[sP] · [dR](C)[sP] · [dR](T)[sP] · |
| | [LR](G)[sP] · [dR](T)[sP] · [dR](G)[sP] · [dR](G)[sP] · [LR](A)[sP] · [dR](T)[sP] · |
| | [LR](A)[sP] · [dR](G)[sP] · [dR](G)[sP] · [dR](G)[sP] · [LR](A)[sP] · [LR](A) |
| SEQ ID 326 | [LR](A)[sP] · [dR](A)[sP] · [dR](C)[sP] · [LR](A)[sP] · [dR](C)[sP] · [LR]([5meC])[sP] · |
| | [dR](C)[sP] · [dR](C)[sP] · [dR](T)[sP] · [LR](G)[sP] · [dR](T)[sP] · [dR](G)[sP] · |
| | [dR](G)[sP] · [LR](A)[sP] · [dR](T)[sP] · [dR](A)[sP] · [LR](G)[sP] · [LR](G) |
| SEQ ID 327 | [LR](A)[sP] · [dR](C)[sP] · [LR](A)[sP] · [dR](A)[sP] · [LR](A)[sP] · [dR](C)[sP] · |
| | [LR](A)[sP] · [dR](C)[sP] · [dR](C)[sP] · [LR]([5meC])[sP] · [dR](C)[sP] · [dR](T)[sP] · |
| | [LR](G)[sP] · [dR](T)[sP] · [dR](G)[sP] · [dR](G)[sP] · [LR](A)[sP] · [LR](T) |
| SEQ ID 328 | [LR]([5meC])[sP] · [dR](A)[sP] · [dR](C)[sP] · [LR](A)[sP] · [dR](C)[sP] · [LR](A)[sP] · |
| | [dR](A)[sP] · [dR](A)[sP] · [dR](C)[sP] · [LR](A)[sP] · [dR](C)[sP] · [dR](C)[sP] · |
| | [dR](C)[sP] · [LR]([5meC])[sP] · [dR](T)[sP] · [dR](G)[sP] · [LR](T)[sP] · [LR](G) |
| SEQ ID 329 | [LR](A)[sP] · [LR]([5meC])[sP] · [dR](A)[sP] · [dR](C)[sP] · [LR](A)[sP] · [dR](C)[sP] · |
| | [LR](A)[sP] · [dR](C)[sP] · [LR](A)[sP] · [dR](A)[sP] · [dR](A)[sP] · [dR](C)[sP] · |
| | [LR](A)[sP] · [dR](C)[sP] · [dR](C)[sP] · [dR](C)[sP] · [LR]([5meC])[sP] · [LR](T) |
| SEQ ID 330 | [LR]([5meC])[sP] · [LR](G)[sP] · [dR](C)[sP] · [dR](A)[sP] · [dR](C)[sP] · [LR](A)[sP] · |
| | [dR](C)[sP] · [dR](A)[sP] · [dR](C)[sP] · [LR](A)[sP] · [dR](C)[sP] · [LR](A)[sP] · |
| | [dR](A)[sP] · [dR](A)[sP] · [dR](C)[sP] · [LR](A)[sP] · [LR]([5meC])[sP] ·[LR]([5meC] |
| SEQ ID 331 | [LR](A)[sP] · [dR]([5meC])[sP] · [dR](G)[sP] · [LR]([5meC])[sP] · [dR](G)[sP] · [dR](C)[sP] · |
| | [dR](A)[sP] · [LR]([5meC])[sP] · [dR](A)[sP] · [LR]([5meC])[sP] · [LR](A)[sP] · [dR](C)[sP] · |
| | [LR](A)[sP] · [dR](C)[sP] · [LR](A)[sP] · [dR](A)[sP] · [LR](A)[sP] · [LR]([5meC] |
| SEQ ID 332 | [LR]([5meC])[sP] · [dR](A)[sP] · [dR](C)[sP] · [LR](A)[sP] · [dR](C)[sP] · [LR](G)[sP] · |
| | [dR]([5meC])[sP] · [dR](G)[sP] · [dR](C)[sP] · [LR](A)[sP] · [dR](C)[sP] · [dR](A)[sP] · |
| | [dR](C)[sP] · [LR](A)[sP] · [dR](C)[sP] · [LR](A)[sP] · [LR]([5meC])[sP] · [LR](A) |
| SEQ ID 333 | [LR](A)[sP] · [dR]([5meC])[sP] · [dR](G)[sP] · [dR](C)[sP] · [LR](A)[sP] · [dR](C)[sP] · |
| | [dR](A)[sP] · [dR](C)[sP] · [LR](G)[sP] · [dR]([5meC])[sP] · [dR](G)[sP] · [dR](C)[sP] · |
| | [LR](A)[sP] · [dR](C)[sP] · [dR](A)[sP] · [dR](C)[sP] · [LR](A)[sP] · [LR]([5meC] |
| SEQ ID 334 | [LR](G)[sP] · [dR](A)[sP] · [LR](A)[sP] · [dR](A)[sP] · [dR](C)[sP] · [LR](G)[sP] · |
| | [dR](C)[sP] · [dR](A)[sP] · [dR](C)[sP] · [LR](A)[sP] · [dR]([5meC])[sP] · [dR](G)[sP] · |
| | [dR](C)[sP] · [LR](G)[sP] · [dR](C)[sP] · [dR](A)[sP] · [LR]([5meC]) · [LR](A) |
| SEQ ID 335 | [LR](A)[sP] · [dR](T)[sP] · [dR](T)[sP] · [dR](G)[sP] · [LR](A)[sP] · [LR](A)[sP] · |
| | [dR](A)[sP] · [LR]([5meC])[sP] · [dR](G)[sP] · [dR](C)[sP] · [LR](A)[sP] · [dR](C)[sP] · |
| | [LR](A)[sP] · [dR](C)[sP] · [LR](G)[sP] · [dR](C)[sP] · [LR](G)[sP] · [LR]([5meC] |
| SEQ ID 336 | [LR](T)[sP] · [LR](T)[sP] · [dR](T)[sP] · [LR](A)[sP] · [dR](T)[sP] · [LR](T)[sP] · |
| | [LR](G)[sP] · [dR](A)[sP] · [LR](A)[sP] · [LR](A)[sP] · [LR]([5meC])[sP] · [dR](G)[sP] · |
| | [LR]([5meC])[sP] · [LR](A)[sP] · [dR](C)[sP] · [dR](A)[sP] · [LR]([5meC])[sP] · [LR](G) |
| SEQ ID 337 | [LR](A)[sP] · [LR](A)[sP] · [LR]([5meC])[sP] · [dR](T)[sP] · [dR](T)[sP] · [dR](T)[sP] · |
| | [LR](A)[sP] · [dR](T)[sP] · [LR](T)[sP] · [LR](G)[sP] · [LR](A)[sP] · [dR](A)[sP] · |
| | [LR](A)[sP] · [LR]([5meC])[sP] · [dR](G)[sP] · [LR]([5meC])[sP] · [LR](A)[sP] · [LR]([5meC] |
| SEQ ID 338 | [LR](A)[sP] · [LR]([5meC])[sP] · [LR](A)[sP] · [dR](A)[sP] · [dR](A)[sP] · [LR]([5meC])[sP] · |
| | [LR](T)[sP] · [dR](T)[sP] · [LR](T)[sP] · [LR](A)[sP] · [dR](T)[sP] · [LR](T)[sP] · |
| | [LR](G)[sP] · [LR](A)[sP] · [dR](A)[sP] · [LR](A)[sP] · [LR]([5meC])[sP] · [LR](G) |
| SEQ ID 339 | [LR](T)[sP] · [LR](G)[sP] · [dR](T)[sP] · [dR](A)[sP] · [LR]([5meC])[sP] · [LR](A)[sP] · |
| | [dR](A)[sP] · [LR](A)[sP] · [LR]([5meC])[sP] · [LR](T)[sP] · [dR](T)[sP] · [LR](T)[sP] · |
| | [LR](A)[sP] · [LR](T)[sP] · [dR](T)[sP] · [LR](G)[sP] · [LR](A)[sP] · [LR](A) |
| SEQ ID 340 | [LR](A)[sP] · [dR](A)[sP] · [LR](G)[sP] · [LR](T)[sP] · [LR](G)[sP] · [dR](T)[sP] · |
| | [LR](A)[sP] · [LR]([5meC])[sP] · [LR](A)[sP] · [dR](A)[sP] · [LR](A)[sP] · [LR]([5meC])[sP] · |
| | [LR](T)[sP] · [dR](T)[sP] · [LR](T)[sP] · [dR](A)[sP] · [LR](T)[sP] · [LR](T) |
| SEQ ID 341 | [LR](A)[sP] · [LR](G)[sP] · [dR](A)[sP] · [dR](A)[sP] · [LR](A)[sP] · [LR](G)[sP] · |
| | [LR](T)[sP] · [dR](G)[sP] · [LR](T)[sP] · [LR](A)[sP] · [LR]([5meC][sP] · [dR](A)[sP] · |
| | [LR](A)[sP] · [dR](A)[sP] · [LR]([5meC])[sP] · [dR](T)[sP] · [LR](T)[sP] · [LR](T) |
| SEQ ID 342 | [LR](T)[sP] · [LR](T)[sP] · [LR](A)[sP] · [dR](A)[sP] · [LR](G)[sP] · [LR](A)[sP] · |
| | [dR](A)[sP] · [LR](A)[sP] · [LR](G)[sP] · [LR](T)[sP] · [dR](G)[sP] · [LR](T)[sP] · |
| | [LR](A)[sP] · [LR]([5meC])[sP] · [dR](A)[sP] · [dR](A)[sP] · [LR](A)[sP] · [LR]([5meC] |

Helm Annotation Key:
[LR](G) is a beta-D-oxy-LNA guanine nucleoside,
[LR](T) is a beta-D-oxy-LNA thymine nucleoside,
[LR](A) is a beta-D-oxy-LNA adenine nucleoside,
[LR]([5meC] is a beta-D-oxy-LNA 5-methyl cystosine nucleoside,
[dR](G) is a DNA guanine nucleoside,
[dR](T) is a DNA thymine nucleoside,
[dR](A) is a DNA adenine nucleoside,
[dR]([C] is a DNA cytosine nucleoside,
[mR](G) is a 2′-O-methyl RNA guanine nucleoside,
[mR](U) is a 2′-O-methyl RNA DNA uracil nucleoside,
[mR](A) is a 2′-O-methyl RNA DNA adenine nucleoside,
[mR]([C] is a 2′-O-methyl RNA DNA cytosine nucleoside,
[sP] is a phosphorothioate internucleoside linkage.

The application's sequence listing, which the Patent Office published only in electronic form, follows.

SEQUENCE LISTING (3951 sequences)

SEQ ID NO: 1 - RNA, 2129 nt, Homo sapiens
  modified_base 3: mod_base = OTHER; note = thymine
  modified_base 6: mod_base = OTHER; note = thymine
  modified_base 24: mod_base = OTHER; note = thymine
  modified_base 42: mod_base = OTHER; note = thymine
  modified_base 44: mod_base = OTHER; note = thymine
  modified_base 51: mod_base = OTHER; note = thymine
  modified_base 54: mod_base = OTHER; note = thymine
  modified_base 59: mod_base = OTHER; note = thymine
  modified_base 63: mod_base = OTHER; note = thymine
  modified_base 68..69: mod_base = OTHER; note = thymine
  modified_base 81: mod_base = OTHER; note = thymine
  modified_base 84: mod_base = OTHER; note = thymine
  modified_base 88: mod_base = OTHER; note = thymine
  modified_base 98: mod_base = OTHER; note = thymine
  modified_base 106: mod_base = OTHER; note = thymine
  modified_base 109: mod_base = OTHER; note = thymine
  modified_base 113..114: mod_base = OTHER; note = thymine
  modified_base 116: mod_base = OTHER; note = thymine
  modified_base 121: mod_base = OTHER; note = thymine
  modified_base 123: mod_base = OTHER; note = thymine
  modified_base 128: mod_base = OTHER; note = thymine
  modified_base 131: mod_base = OTHER; note = thymine
  modified_base 135: mod_base = OTHER; note = thymine
  modified_base 155: mod_base = OTHER; note = thymine
  modified_base 161: mod_base = OTHER; note = thymine
  modified_base 164: mod_base = OTHER; note = thymine
  modified_base 169: mod_base = OTHER; note = thymine
  modified_base 174..175: mod_base = OTHER; note = thymine
  modified_base 177: mod_base = OTHER; note = thymine
  modified_base 185: mod_base = OTHER; note = thymine
  modified_base 198: mod_base = OTHER; note = thymine
  modified_base 208: mod_base = OTHER; note = thymine
  modified_base 210: mod_base = OTHER; note = thymine
  modified_base 214: mod_base = OTHER; note = thymine
  modified_base 221: mod_base = OTHER; note = thymine
  modified_base 228..229: mod_base = OTHER; note = thymine
  modified_base 232: mod_base = OTHER; note = thymine
  modified_base 239: mod_base = OTHER; note = thymine
  modified_base 242: mod_base = OTHER; note = thymine
  modified_base 244: mod_base = OTHER; note = thymine
  modified_base 254: mod_base = OTHER; note = thymine
  modified_base 257: mod_base = OTHER; note = thymine
  modified_base 261: mod_base = OTHER; note = thymine
  modified_base 263..265: mod_base = OTHER; note = thymine
  modified_base 270: mod_base = OTHER; note = thymine
  modified_base 272: mod_base = OTHER; note = thymine
  modified_base 280..281: mod_base = OTHER; note = thymine
  modified_base 286..287: mod_base = OTHER; note = thymine
  modified_base 290: mod_base = OTHER; note = thymine
  modified_base 296..297: mod_base = OTHER; note = thymine
  modified_base 309: mod_base = OTHER; note = thymine
  modified_base 314: mod_base = OTHER; note = thymine
  modified_base 322: mod_base = OTHER; note = thymine
  modified_base 328: mod_base = OTHER; note = thymine
  modified_base 332: mod_base = OTHER; note = thymine
  modified_base 335: mod_base = OTHER; note = thymine
  modified_base 347..348: mod_base = OTHER; note = thymine
  modified_base 353: mod_base = OTHER; note = thymine
  modified_base 358: mod_base = OTHER; note = thymine
  modified_base 371: mod_base = OTHER; note = thymine
  modified_base 374: mod_base = OTHER; note = thymine
  modified_base 377..378: mod_base = OTHER; note = thymine
  modified_base 386: mod_base = OTHER; note = thymine
  modified_base 391: mod_base = OTHER; note = thymine
  modified_base 398: mod_base = OTHER; note = thymine
  modified_base 402: mod_base = OTHER; note = thymine
  modified_base 406: mod_base = OTHER; note = thymine
  modified_base 411: mod_base = OTHER; note = thymine
  modified_base 416: mod_base = OTHER; note = thymine
  modified_base 421: mod_base = OTHER; note = thymine
  modified_base 424: mod_base = OTHER; note = thymine
  modified_base 427: mod_base = OTHER; note = thymine
  modified_base 431..432: mod_base = OTHER; note = thymine
  modified_base 437: mod_base = OTHER; note = thymine
  modified_base 446..447: mod_base = OTHER; note = thymine
  modified_base 449: mod_base = OTHER; note = thymine
  modified_base 455: mod_base = OTHER; note = thymine
  modified_base 458: mod_base = OTHER; note = thymine
  modified_base 460: mod_base = OTHER; note = thymine
  modified_base 462..463: mod_base = OTHER; note = thymine
  modified_base 465: mod_base = OTHER; note = thymine
  modified_base 468: mod_base = OTHER; note = thymine
  modified_base 472: mod_base = OTHER; note = thymine
  modified_base 476: mod_base = OTHER; note = thymine
  modified_base 479: mod_base = OTHER; note = thymine
  modified_base 485: mod_base = OTHER; note = thymine
  modified_base 488: mod_base = OTHER; note = thymine
  modified_base 495: mod_base = OTHER; note = thymine
  modified_base 505..506: mod_base = OTHER; note = thymine
  modified_base 509: mod_base = OTHER; note = thymine
  modified_base 512: mod_base = OTHER; note = thymine
  modified_base 514: mod_base = OTHER; note = thymine
  modified_base 525: mod_base = OTHER; note = thymine
  modified_base 530: mod_base = OTHER; note = thymine
  modified_base 533: mod_base = OTHER; note = thymine
  modified_base 535: mod_base = OTHER; note = thymine
  modified_base 544: mod_base = OTHER; note = thymine
  modified_base 548..549: mod_base = OTHER; note = thymine
  modified_base 551: mod_base = OTHER; note = thymine
  modified_base 558: mod_base = OTHER; note = thymine
  modified_base 561..562: mod_base = OTHER; note = thymine
  modified_base 572: mod_base = OTHER; note = thymine
  modified_base 576: mod_base = OTHER; note = thymine
  modified_base 600: mod_base = OTHER; note = thymine
  modified_base 612: mod_base = OTHER; note = thymine
  modified_base 616: mod_base = OTHER; note = thymine
  modified_base 628: mod_base = OTHER; note = thymine
  modified_base 639: mod_base = OTHER; note = thymine
  modified_base 644..645: mod_base = OTHER; note = thymine
  modified_base 647: mod_base = OTHER; note = thymine
  modified_base 653: mod_base = OTHER; note = thymine
  modified_base 657: mod_base = OTHER; note = thymine
  modified_base 660: mod_base = OTHER; note = thymine
  modified_base 662: mod_base = OTHER; note = thymine
  modified_base 664: mod_base = OTHER; note = thymine
  modified_base 677: mod_base = OTHER; note = thymine
  modified_base 683: mod_base = OTHER; note = thymine
  modified_base 688: mod_base = OTHER; note = thymine
  modified_base 691: mod_base = OTHER; note = thymine
  modified_base 694..695: mod_base = OTHER; note = thymine
  modified_base 697: mod_base = OTHER; note = thymine
  modified_base 701: mod_base = OTHER; note = thymine
  modified_base 704: mod_base = OTHER; note = thymine
  modified_base 706: mod_base = OTHER; note = thymine
  modified_base 711: mod_base = OTHER; note = thymine
  modified_base 718: mod_base = OTHER; note = thymine
  modified_base 725: mod_base = OTHER; note = thymine
  modified_base 727: mod_base = OTHER; note = thymine
  modified_base 731: mod_base = OTHER; note = thymine
  modified_base 734: mod_base = OTHER; note = thymine
  modified_base 741: mod_base = OTHER; note = thymine
  modified_base 755: mod_base = OTHER; note = thymine
  modified_base 758: mod_base = OTHER; note = thymine
  modified_base 761: mod_base = OTHER; note = thymine
  modified_base 766: mod_base = OTHER; note = thymine
  modified_base 771: mod_base = OTHER; note = thymine
  modified_base 776: mod_base = OTHER; note = thymine
  modified_base 779: mod_base = OTHER; note = thymine
  modified_base 793: mod_base = OTHER; note = thymine
  modified_base 795: mod_base = OTHER; note = thymine
  modified_base 797: mod_base = OTHER; note = thymine
  modified_base 799: mod_base = OTHER; note = thymine
  modified_base 804: mod_base = OTHER; note = thymine
  modified_base 807: mod_base = OTHER; note = thymine
  modified_base 814: mod_base = OTHER; note = thymine
  modified_base 818: mod_base = OTHER; note = thymine
  modified_base 822: mod_base = OTHER; note = thymine
  modified_base 824: mod_base = OTHER; note = thymine
  modified_base 838: mod_base = OTHER; note = thymine
  modified_base 849: mod_base = OTHER; note = thymine
  modified_base 852: mod_base = OTHER; note = thymine
  modified_base 856: mod_base = OTHER; note = thymine
  modified_base 861: mod_base = OTHER; note = thymine
  modified_base 865: mod_base = OTHER; note = thymine
  modified_base 876: mod_base = OTHER; note = thymine
  modified_base 883: mod_base = OTHER; note = thymine
  modified_base 885: mod_base = OTHER; note = thymine
  modified_base 890: mod_base = OTHER; note = thymine
  modified_base 892: mod_base = OTHER; note = thymine
  modified_base 897: mod_base = OTHER; note = thymine
  modified_base 903: mod_base = OTHER; note = thymine
  modified_base 908: mod_base = OTHER; note = thymine
  modified_base 916: mod_base = OTHER; note = thymine
  modified_base 920: mod_base = OTHER; note = thymine
  modified_base 922: mod_base = OTHER; note = thymine
  modified_base 926: mod_base = OTHER; note = thymine
  modified_base 929: mod_base = OTHER; note = thymine
  modified_base 934: mod_base = OTHER; note = thymine
  modified_base 936: mod_base = OTHER; note = thymine
  modified_base 941: mod_base = OTHER; note = thymine
  modified_base 950: mod_base = OTHER; note = thymine
  modified_base 956: mod_base = OTHER; note = thymine
  modified_base 959: mod_base = OTHER; note = thymine
  modified_base 964..967: mod_base = OTHER; note = thymine
  modified_base 976: mod_base = OTHER; note = thymine
  modified_base 978: mod_base = OTHER; note = thymine
  modified_base 980: mod_base = OTHER; note = thymine
  modified_base 983: mod_base = OTHER; note = thymine
  modified_base 985: mod_base = OTHER; note = thymine
  modified_base 996: mod_base = OTHER; note = thymine
  modified_base 1001: mod_base = OTHER; note = thymine
  modified_base 1004: mod_base = OTHER; note = thymine
  modified_base 1006: mod_base = OTHER; note = thymine
  modified_base 1016..1018: mod_base = OTHER; note = thymine
  modified_base 1022: mod_base = OTHER; note = thymine
  modified_base 1024: mod_base = OTHER; note = thymine
  modified_base 1039: mod_base = OTHER; note = thymine
  modified_base 1043: mod_base = OTHER; note = thymine
  modified_base 1045: mod_base = OTHER; note = thymine
  modified_base 1065: mod_base = OTHER; note = thymine
  modified_base 1070: mod_base = OTHER; note = thymine
  modified_base 1074: mod_base = OTHER; note = thymine
  modified_base 1090: mod_base = OTHER; note = thymine
  modified_base 1095: mod_base = OTHER; note = thymine
  modified_base 1101: mod_base = OTHER; note = thymine
  modified_base 1118..1119: mod_base = OTHER; note = thymine
  modified_base 1129: mod_base = OTHER; note = thymine
  modified_base 1131: mod_base = OTHER; note = thymine
  modified_base 1136: mod_base = OTHER; note = thymine
  modified_base 1138: mod_base = OTHER; note = thymine
  modified_base 1141: mod_base = OTHER; note = thymine
  modified_base 1144: mod_base = OTHER; note = thymine
  modified_base 1146: mod_base = OTHER; note = thymine
  modified_base 1154: mod_base = OTHER; note = thymine
  modified_base 1156: mod_base = OTHER; note = thymine
  modified_base 1160: mod_base = OTHER; note = thymine
  modified_base 1163: mod_base = OTHER; note = thymine
  modified_base 1168: mod_base = OTHER; note = thymine
  modified_base 1172: mod_base = OTHER; note = thymine
  modified_base 1175: mod_base = OTHER; note = thymine
  modified_base 1182: mod_base = OTHER; note = thymine
  modified_base 1187: mod_base = OTHER; note = thymine
  modified_base 1189: mod_base = OTHER; note = thymine
  modified_base 1196: mod_base = OTHER; note = thymine
  modified_base 1202: mod_base = OTHER; note = thymine
  modified_base 1205: mod_base = OTHER; note = thymine
  modified_base 1207: mod_base = OTHER; note = thymine
  modified_base 1212: mod_base = OTHER; note = thymine
  modified_base 1222: mod_base = OTHER; note = thymine
  modified_base 1224: mod_base = OTHER; note = thymine
  modified_base 1226: mod_base = OTHER; note = thymine
  modified_base 1229: mod_base = OTHER; note = thymine
  modified_base 1232: mod_base = OTHER; note = thymine
  modified_base 1247: mod_base = OTHER; note = thymine
  modified_base 1250: mod_base = OTHER; note = thymine
  modified_base 1262: mod_base = OTHER; note = thymine
  modified_base 1268: mod_base = OTHER; note = thymine
  modified_base 1270: mod_base = OTHER; note = thymine
  modified_base 1272: mod_base = OTHER; note = thymine
  modified_base 1276: mod_base = OTHER; note = thymine
  modified_base 1286: mod_base = OTHER; note = thymine
  modified_base 1288: mod_base = OTHER; note = thymine
  modified_base 1305: mod_base = OTHER; note = thymine
  modified_base 1308: mod_base = OTHER; note = thymine
  modified_base 1312: mod_base = OTHER; note = thymine
  modified_base 1317: mod_base = OTHER; note = thymine
  modified_base 1326: mod_base = OTHER; note = thymine
  modified_base 1330: mod_base = OTHER; note = thymine
  modified_base 1342..1343: mod_base = OTHER; note = thymine
  modified_base 1346..1347: mod_base = OTHER; note = thymine
  modified_base 1349: mod_base = OTHER; note = thymine
  modified_base 1365: mod_base = OTHER; note = thymine
  modified_base 1370: mod_base = OTHER; note = thymine
  modified_base 1372: mod_base = OTHER; note = thymine
  modified_base 1388: mod_base = OTHER; note = thymine
  modified_base 1395: mod_base = OTHER; note = thymine
  modified_base 1406: mod_base = OTHER; note = thymine
  modified_base 1409: mod_base = OTHER; note = thymine
  modified_base 1419: mod_base = OTHER; note = thymine
  modified_base 1423: mod_base = OTHER; note = thymine
  modified_base 1430: mod_base = OTHER; note = thymine
  modified_base 1436: mod_base = OTHER; note = thymine
  modified_base 1439: mod_base = OTHER; note = thymine
  modified_base 1445..1446: mod_base = OTHER; note = thymine
  modified_base 1453: mod_base = OTHER; note = thymine
  modified_base 1456: mod_base = OTHER; note = thymine
  modified_base 1458: mod_base = OTHER; note = thymine
  modified_base 1460: mod_base = OTHER; note = thymine
  modified_base 1463: mod_base = OTHER; note = thymine
  modified_base 1471: mod_base = OTHER; note = thymine
  modified_base 1481: mod_base = OTHER; note = thymine
  modified_base 1484: mod_base = OTHER; note = thymine
  modified_base 1492: mod_base = OTHER; note = thymine
  modified_base 1496: mod_base = OTHER; note = thymine
  modified_base 1502: mod_base = OTHER; note = thymine
  modified_base 1509: mod_base = OTHER; note = thymine
  modified_base 1516: mod_base = OTHER; note = thymine
  modified_base 1520: mod_base = OTHER; note = thymine
  modified_base 1523: mod_base = OTHER; note = thymine
  modified_base 1536: mod_base = OTHER; note = thymine
  modified_base 1539: mod_base = OTHER; note = thymine
  modified_base 1541: mod_base = OTHER; note = thymine
  modified_base 1543: mod_base = OTHER; note = thymine
  modified_base 1552: mod_base = OTHER; note = thymine
  modified_base 1559..1560: mod_base = OTHER; note = thymine
  modified_base 1563: mod_base = OTHER; note = thymine
  modified_base 1570: mod_base = OTHER; note = thymine
  modified_base 1576: mod_base = OTHER; note = thymine
  modified_base 1581: mod_base = OTHER; note = thymine
  modified_base 1585: mod_base = OTHER; note = thymine
  modified_base 1587: mod_base = OTHER; note = thymine
  modified_base 1596: mod_base = OTHER; note = thymine
  modified_base 1601: mod_base = OTHER; note = thymine
  modified_base 1603: mod_base = OTHER; note = thymine
  modified_base 1616..1617: mod_base = OTHER; note = thymine
  modified_base 1619: mod_base = OTHER; note = thymine
  modified_base 1624: mod_base = OTHER; note = thymine
  modified_base 1627: mod_base = OTHER; note = thymine
  modified_base 1637: mod_base = OTHER; note = thymine
  modified_base 1640: mod_base = OTHER; note = thymine
  modified_base 1661: mod_base = OTHER; note = thymine
  modified_base 1667: mod_base = OTHER; note = thymine
  modified_base 1670: mod_base = OTHER; note = thymine
  modified_base 1672: mod_base = OTHER; note = thymine
  modified_base 1676: mod_base = OTHER; note = thymine
  modified_base 1689: mod_base = OTHER; note = thymine
  modified_base 1691: mod_base = OTHER; note = thymine
  modified_base 1693..1694: mod_base = OTHER; note = thymine
  modified_base 1696: mod_base = OTHER; note = thymine
  modified_base 1699: mod_base = OTHER; note = thymine
  modified_base 1702: mod_base = OTHER; note = thymine
  modified_base 1712: mod_base = OTHER; note = thymine
  modified_base 1715: mod_base = OTHER; note = thymine
  modified_base 1717: mod_base = OTHER; note = thymine
  modified_base 1720: mod_base = OTHER; note = thymine
  modified_base 1723: mod_base = OTHER; note = thymine
  modified_base 1727..1728: mod_base = OTHER; note = thymine
  modified_base 1733: mod_base = OTHER; note = thymine
  modified_base 1747: mod_base = OTHER; note = thymine
  modified_base 1754: mod_base = OTHER; note = thymine
  modified_base 1756..1758: mod_base = OTHER; note = thymine
  modified_base 1778: mod_base = OTHER; note = thymine
  modified_base 1789..1791: mod_base = OTHER; note = thymine
  modified_base 1805..1806: mod_base = OTHER; note = thymine
  modified_base 1815: mod_base = OTHER; note = thymine
  modified_base 1818: mod_base = OTHER; note = thymine
  modified_base 1820: mod_base = OTHER; note = thymine
  modified_base 1830: mod_base = OTHER; note = thymine
  modified_base 1833: mod_base = OTHER; note = thymine
  modified_base 1840: mod_base = OTHER; note = thymine
  modified_base 1842: mod_base = OTHER; note = thymine
  modified_base 1850: mod_base = OTHER; note = thymine
  modified_base 1862: mod_base = OTHER; note = thymine
  modified_base 1870: mod_base = OTHER; note = thymine
  modified_base 1875: mod_base = OTHER; note = thymine
  modified_base 1877: mod_base = OTHER; note = thymine
  modified_base 1880: mod_base = OTHER; note = thymine
  modified_base 1887: mod_base = OTHER; note = thymine
  modified_base 1891: mod_base = OTHER; note = thymine
  modified_base 1898: mod_base = OTHER; note = thymine
  modified_base 1904: mod_base = OTHER; note = thymine
  modified_base 1912..1913: mod_base = OTHER; note = thymine
  modified_base 1915: mod_base = OTHER; note = thymine
  modified_base 1919: mod_base = OTHER; note = thymine
  modified_base 1928..1929: mod_base = OTHER; note = thymine
  modified_base 1931: mod_base = OTHER; note = thymine
  modified_base 1936: mod_base = OTHER; note = thymine
  modified_base 1942: mod_base = OTHER; note = thymine
  modified_base 1948: mod_base = OTHER; note = thymine
  modified_base 1955: mod_base = OTHER; note = thymine
  modified_base 1962: mod_base = OTHER; note = thymine
  modified_base 1966: mod_base = OTHER; note = thymine
  modified_base 1968: mod_base = OTHER; note = thymine
  modified_base 1975..1976: mod_base = OTHER; note = thymine
  modified_base 1980: mod_base = OTHER; note = thymine
  modified_base 1982: mod_base = OTHER; note = thymine
  modified_base 1993..1994: mod_base = OTHER; note = thymine
  modified_base 1996: mod_base = OTHER; note = thymine
  modified_base 2010..2011: mod_base = OTHER; note = thymine
  modified_base 2018: mod_base = OTHER; note = thymine
  modified_base 2023: mod_base = OTHER; note = thymine
  modified_base 2028: mod_base = OTHER; note = thymine
  modified_base 2034..2036: mod_base = OTHER; note = thymine
  modified_base 2040: mod_base = OTHER; note = thymine
  modified_base 2047: mod_base = OTHER; note = thymine
  modified_base 2049: mod_base = OTHER; note = thymine
  modified_base 2057: mod_base = OTHER; note = thymine
  modified_base 2060..2063: mod_base = OTHER; note = thymine
  modified_base 2067: mod_base = OTHER; note = thymine
  modified_base 2069: mod_base = OTHER; note = thymine
  modified_base 2079: mod_base = OTHER; note = thymine
  modified_base 2081..2083: mod_base = OTHER; note = thymine
  modified_base 2085: mod_base = OTHER; note = thymine
  modified_base 2087: mod_base = OTHER; note = thymine
  modified_base 2089: mod_base = OTHER; note = thymine
  modified_base 2091: mod_base = OTHER; note = thymine
  modified_base 2097: mod_base = OTHER; note = thymine
  modified_base 2099: mod_base = OTHER; note = thymine
  modified_base 2103..2105: mod_base = OTHER; note = thymine
  modified_base 2109: mod_base = OTHER; note = thymine
  modified_base 2114..2116: mod_base = OTHER; note = thymine
  modified_base 2118: mod_base = OTHER; note = thymine
  modified_base 2123..2125: mod_base = OTHER; note = thymine
  modified_base 2127..2128: mod_base = OTHER; note = thymine
  source 1..2129: mol_type = mRNA
gctgctgcccaaggaccgcggagtcggacgcaggcagaccatgtggaccctggtgagctgggtggccttaacagcagggctggtggctggaacgcggtgcccagatggtcagttctgccctgtggcctgctgcctggaccccggaggagccagctacagctgctgccgtccccttctggacaaatggcccacaacactgagcaggcatctgggtggcccctgccaggttgatgcccactgctctgccggccactcctgcatctttaccgtctcagggacttccagttgctgccccttcccagaggccgtggcatgcggggatggccatcactgctgcccacggggcttccactgcagtgcagacgggcgatcctgcttccaaagatcaggtaacaactccgtgggtgccatccagtgccctgatagtcagttcgaatgcccggacttctccacgtgctgtgttatggtcgatggctcctgggggtgctgccccatgccccaggcttcctgctgtgaagacagggtgcactgctgtccgcacggtgccttctgcgacctggttcacacccgctgcatcacacccacgggcacccaccccctggcaaagaagctccctgcccagaggactaacagggcagtggccttgtccagctcggtcatgtgtccggacgcacggtcccggtgccctgatggttctacctgctgtgagctgcccagtgggaagtatggctgctgcccaatgcccaacgccacctgctgctccgatcacctgcactgctgcccccaagacactgtgtgtgacctgatccagagtaagtgcctctccaaggagaacgctaccacggacctcctcactaagctgcctgcgcacacagtgggggatgtgaaatgtgacatggaggtgagctgcccagatggctatacctgctgccgtctacagtcgggggcctggggctgctgcccttttacccaggctgtgtgctgtgaggaccacatacactgctgtcccgcggggtttacgtgtgacacgcagaagggtacctgtgaacaggggccccaccaggtgccctggatggagaaggccccagctcacctcagcctgccagacccacaagccttgaagagagatgtcccctgtgataatgtcagcagctgtccctcctccgatacctgctgccaactcacgtctggggagtggggctgctgtccaatcccagaggctgtctgctgctcggaccaccagcactgctgcccccagggctacacgtgtgtagctgaggggcagtgtcagcgaggaagcgagatcgtggctggactggagaagatgcctgcccgccgggcttccttatcccaccccagagacatcggctgtgaccagcacaccagctgcccggtggggcagacctgctgcccgagcctgggtgggagctgggcctgctgccagttgccccatgctgtgtgctgcgaggatcgccagcactgctgcccggctggctacacctgcaacgtgaaggctcgatcctgcgagaaggaagtggtctctgcccagcctgccaccttcctggcccgtagccctcacgtgggtgtgaaggacgtggagtgtggggaaggacacttctgccatgataaccagacctgctgccgagacaaccgacagggctgggcctgctgtccctaccgccagggcgtctgttgtgctgatcggcgccactgctgtcctgctggcttccgctgcgcagccaggggtaccaagtgtttgcgcagggaggccccgcgctgggacgcccctttgagggacccagccttgagacagctgctgtgagggacagtactgaagactctgcagccctcgggaccccactcggagggtgccctctgctcaggcctccctagcacctccccctaaccaaattctccctggaccccattctgagctccccatcaccatgggaggtggggcctcaatctaaggccttccctgtcagaagggggttgtggcaaaagccacattacaagctgccatcccctccccgtttcagtggaccctgtggccaggtgcttttccctatccacaggggtgtttgtgtgtgtgcgcgtgtgcgtttcaataaagtttgtacactttctta

SEQ ID NO: 2 - RNA, 308 nt, Homo sapiens
  modified_base 8: mod_base = OTHER; note = thymine
  modified_base 11: mod_base = OTHER; note = thymine
  modified_base 18: mod_base = OTHER; note = thymine
  modified_base 20: mod_base = OTHER; note = thymine
  modified_base 28: mod_base = OTHER; note = thymine
  modified_base 40: mod_base = OTHER; note = thymine
  modified_base 48: mod_base = OTHER; note = thymine
  modified_base 53: mod_base = OTHER; note = thymine
  modified_base 55: mod_base = OTHER; note = thymine
  modified_base 58: mod_base = OTHER; note = thymine
  modified_base 65: mod_base = OTHER; note = thymine
  modified_base 69: mod_base = OTHER; note = thymine
  modified_base 76: mod_base = OTHER; note = thymine
  modified_base 82: mod_base = OTHER; note = thymine
  modified_base 90..91: mod_base = OTHER; note = thymine
  modified_base 93: mod_base = OTHER; note = thymine
  modified_base 97: mod_base = OTHER; note = thymine
  modified_base 106..107: mod_base = OTHER; note = thymine
  modified_base 109: mod_base = OTHER; note = thymine
  modified_base 114: mod_base = OTHER; note = thymine
  modified_base 120: mod_base = OTHER; note = thymine
  modified_base 126: mod_base = OTHER; note = thymine
  modified_base 133: mod_base = OTHER; note = thymine
  modified_base 140: mod_base = OTHER; note = thymine
  modified_base 144: mod_base = OTHER; note = thymine
  modified_base 146: mod_base = OTHER; note = thymine
  modified_base 153..154: mod_base = OTHER; note = thymine
  modified_base 158: mod_base = OTHER; note = thymine
  modified_base 160: mod_base = OTHER; note = thymine
  modified_base 171..172: mod_base = OTHER; note = thymine
  modified_base 174: mod_base = OTHER; note = thymine
  modified_base 188..189: mod_base = OTHER; note = thymine
  modified_base 196: mod_base = OTHER; note = thymine
  modified_base 201: mod_base = OTHER; note = thymine
  modified_base 206: mod_base = OTHER; note = thymine
  modified_base 212..214: mod_base = OTHER; note = thymine
  modified_base 218: mod_base = OTHER; note = thymine
  modified_base 225: mod_base = OTHER; note = thymine
  modified_base 227: mod_base = OTHER; note = thymine
  modified_base 235: mod_base = OTHER; note = thymine
  modified_base 238..241: mod_base = OTHER; note = thymine
  modified_base 245: mod_base = OTHER; note = thymine
  modified_base 247: mod_base = OTHER; note = thymine
  modified_base 257: mod_base = OTHER; note = thymine
  modified_base 259..261: mod_base = OTHER; note = thymine
  modified_base 263: mod_base = OTHER; note = thymine
  modified_base 265: mod_base = OTHER; note = thymine
  modified_base 267: mod_base = OTHER; note = thymine
  modified_base 269: mod_base = OTHER; note = thymine
  modified_base 275: mod_base = OTHER; note = thymine
  modified_base 277: mod_base = OTHER; note = thymine
  modified_base 281..283: mod_base = OTHER; note = thymine
  modified_base 287: mod_base = OTHER; note = thymine
  modified_base 292..294: mod_base = OTHER; note = thymine
  modified_base 296: mod_base = OTHER; note = thymine
  modified_base 301..303: mod_base = OTHER; note = thymine
  modified_base 305..306: mod_base = OTHER; note = thymine
  source 1..308: mol_type = mRNA
gggacagtactgaagactctgcagccctcgggaccccactcggagggtgccctctgctcaggcctccctagcacctccccctaaccaaattctccctggaccccattctgagctccccatcaccatgggaggtggggcctcaatctaaggccttccctgtcagaagggggttgtggcaaaagccacattacaagctgccatcccctccccgtttcagtggaccctgtggccaggtgcttttccctatccacaggggtgtttgtgtgtgtgcgcgtgtgcgtttcaataaagtttgtacactttcttaa

SEQ ID NO: 3 - DNA, 16 bp, synthetic construct
  misc_feature 1..16: note = Synthetic
  source 1..16: mol_type = other DNA
cctgcttcctctcgcc

SEQ ID NO: 4 - DNA, 16 bp, synthetic construct
  misc_feature 1..16: note = Synthetic
  source 1..16: mol_type = other DNA
ccctgcttcctctcgc

SEQ ID NO: 5 - DNA, 16 bp, synthetic construct
  misc_feature 1..16: note = Synthetic
  source 1..16: mol_type = other DNA
tccctgcttcctctcg

SEQ ID NO: 6 - DNA, 16 bp, synthetic construct
  misc_feature 1..16: note = Synthetic
  source 1..16: mol_type = other DNA
ctccctgcttcctctc

SEQ ID NO: 7 - DNA, 16 bp, synthetic construct
  misc_feature 1..16: note = Synthetic
  source 1..16: mol_type = other DNA
cctccctgcttcctct

SEQ ID NO: 8 - DNA, 16 bp, synthetic construct
  misc_feature 1..16: note = Synthetic
  source 1..16: mol_type = other DNA
tcctccctgcttcctc

SEQ ID NO: 9 - DNA, 16 bp, synthetic construct
  misc_feature 1..16: note = Synthetic
  source 1..16: mol_type = other DNA
ctcctccctgcttcct

SEQ ID NO: 10 - DNA, 16 bp, synthetic construct
  misc_feature 1..16: note = Synthetic
  source 1..16: mol_type = other DNA
tctcctccctgcttcc

SEQ ID NO: 11 - DNA, 16 bp, synthetic construct
  misc_feature 1..16: note = Synthetic
  source 1..16: mol_type = other DNA
ctctcctccctgcttc

SEQ ID NO: 12 - DNA, 16 bp, synthetic construct
  misc_feature 1..16: note = Synthetic
  source 1..16: mol_type = other DNA
actctcctccctgctt

SEQ ID NO: 13 - DNA, 16 bp, synthetic construct
  misc_feature 1..16: note = Synthetic
  source 1..16: mol_type = other DNA
cactctcctccctgct

SEQ ID NO: 14 - DNA, 16 bp, synthetic construct
  misc_feature 1..16: note = Synthetic
  source 1..16: mol_type = other DNA
tcactctcctccctgc

SEQ ID NO: 15 - DNA, 16 bp, synthetic construct
  misc_feature 1..16: note = Synthetic
  source 1..16: mol_type = other DNA
atcactctcctccctg

SEQ ID NO: 16 - DNA, 16 bp, synthetic construct
  misc_feature 1..16: note = Synthetic
  source 1..16: mol_type = other DNA
aatcactctcctccct

SEQ ID NO: 17 - DNA, 16 bp, synthetic construct
  misc_feature 1..16: note = Synthetic
  source 1..16: mol_type = other DNA
aaatcactctcctccc

SEQ ID NO: 18 - DNA, 16 bp, synthetic construct
  misc_feature 1..16: note = Synthetic
  source 1..16: mol_type = other DNA
caaatcactctcctcc

SEQ ID NO: 19 - DNA, 16 bp, synthetic construct
  misc_feature 1..16: note = Synthetic
  source 1..16: mol_type = other DNA
tcaaatcactctcctc

SEQ ID NO: 20 - DNA, 16 bp, synthetic construct
  misc_feature 1..16: note = Synthetic
  source 1..16: mol_type = other DNA
ctcaaatcactctcct

SEQ ID NO: 21 - DNA, 16 bp, synthetic construct
  misc_feature 1..16: note = Synthetic
  source 1..16: mol_type = other DNA
actcaaatcactctcc

SEQ ID NO: 22 - DNA, 16 bp, synthetic construct
  misc_feature 1..16: note = Synthetic
  source 1..16: mol_type = other DNA
tactcaaatcactctc

SEQ ID NO: 23 - DNA, 16 bp, synthetic construct
  misc_feature 1..16: note = Synthetic
  source 1..16: mol_type = other DNA
ctactcaaatcactct

SEQ ID NO: 24 - DNA, 16 bp, synthetic construct
  misc_feature 1..16: note = Synthetic
  source 1..16: mol_type = other DNA
tctactcaaatcactc

SEQ ID NO: 25 - DNA, 16 bp, synthetic construct
  misc_feature 1..16: note = Synthetic
  source 1..16: mol_type = other DNA
ttctactcaaatcact

SEQ ID NO: 26 - DNA, 16 bp, synthetic construct
  misc_feature 1..16: note = Synthetic
  source 1..16: mol_type = other DNA
tttctactcaaatcac

SEQ ID NO: 27 - DNA, 16 bp, synthetic construct
  misc_feature 1..16: note = Synthetic
  source 1..16: mol_type = other DNA
ttttctactcaaatca

SEQ ID NO: 28 - DNA, 16 bp, synthetic construct
  misc_feature 1..16: note = Synthetic
  source 1..16: mol_type = other DNA
cttttctactcaaatc

SEQ ID NO: 29 - DNA, 16 bp, synthetic construct
  misc_feature 1..16: note = Synthetic
  source 1..16: mol_type = other DNA
tcttttctactcaaat

SEQ ID NO: 30 - DNA, 16 bp, synthetic construct
  misc_feature 1..16: note = Synthetic
  source 1..16: mol_type = other DNA
ttcttttctactcaaa

SEQ ID NO: 31 - DNA, 16 bp, synthetic construct
  misc_feature 1..16: note = Synthetic
  source 1..16: mol_type = other DNA
tttcttttctactcaa

SEQ ID NO: 32 - DNA, 16 bp, synthetic construct
  misc_feature 1..16: note = Synthetic
  source 1..16: mol_type = other DNA
gtttcttttctactca

SEQ ID NO: 33 - DNA, 16 bp, synthetic construct
  misc_feature 1..16: note = Synthetic
  source 1..16: mol_type = other DNA
tgtttcttttctactc

SEQ ID NO: 34 - DNA, 16 bp, synthetic construct
  misc_feature 1..16: note = Synthetic
  source 1..16: mol_type = other DNA
gtgtttcttttctact

SEQ ID NO: 35 - DNA, 16 bp, synthetic construct
  misc_feature 1..16: note = Synthetic
  source 1..16: mol_type = other DNA
tgtgtttcttttctac

SEQ ID NO: 36 - DNA, 16 bp, synthetic construct
  misc_feature 1..16: note = Synthetic
  source 1..16: mol_type = other DNA
ctgtgtttcttttcta

SEQ ID NO: 37 - DNA, 16 bp, synthetic construct
  misc_feature 1..16: note = Synthetic
  source 1..16: mol_type = other DNA
gctgtgtttcttttct

SEQ ID NO: 38 - DNA, 16 bp, synthetic construct
  misc_feature 1..16: note = Synthetic
  source 1..16: mol_type = other DNA
tgctgtgtttcttttc

SEQ ID NO: 39 - DNA, 16 bp, synthetic construct
  misc_feature 1..16: note = Synthetic
  source 1..16: mol_type = other DNA
atgctgtgtttctttt

SEQ ID NO: 40 - DNA, 16 bp, synthetic construct
  misc_feature 1..16: note = Synthetic
  source 1..16: mol_type = other DNA
aatgctgtgtttcttt

SEQ ID NO: 41 - DNA, 16 bp, synthetic construct
  misc_feature 1..16: note = Synthetic
  source 1..16: mol_type = other DNA
gaatgctgtgtttctt

SEQ ID NO: 42 - DNA, 16 bp, synthetic construct
  misc_feature 1..16: note = Synthetic
  source 1..16: mol_type = other DNA
ggaatgctgtgtttct

SEQ ID NO: 43 - DNA, 16 bp, synthetic construct
  misc_feature 1..16: note = Synthetic
  source 1..16: mol_type = other DNA
tggaatgctgtgtttc

SEQ ID NO: 44 - DNA, 16 bp, synthetic construct
  misc_feature 1..16: note = Synthetic
  source 1..16: mol_type = other DNA
ctggaatgctgtgttt

SEQ ID NO: 45 - DNA, 16 bp, synthetic construct
  misc_feature 1..16: note = Synthetic
  source 1..16: mol_type = other DNA
cctggaatgctgtgtt

SEQ ID NO: 46 - DNA, 16 bp, synthetic construct
  misc_feature 1..16: note = Synthetic
  source 1..16: mol_type = other DNA
gcctggaatgctgtgt

SEQ ID NO: 47 - DNA, 16 bp, synthetic construct
  misc_feature 1..16: note = Synthetic
  source 1..16: mol_type = other DNA
agcctggaatgctgtg

SEQ ID NO: 48 - DNA, 16 bp, synthetic construct
  misc_feature 1..16: note = Synthetic
  source 1..16: mol_type = other DNA
cagcctggaatgctgt

SEQ ID NO: 49 - DNA, 16 bp, synthetic construct
  misc_feature 1..16: note = Synthetic
  source 1..16: mol_type = other DNA
ccagcctggaatgctg

SEQ ID NO: 50 - DNA, 16 bp, synthetic construct
  misc_feature 1..16: note = Synthetic
  source 1..16: mol_type = other DNA
gccagcctggaatgct

SEQ ID NO: 51 - DNA, 16 bp, synthetic construct
  misc_feature 1..16: note = Synthetic
  source 1..16: mol_type = other DNA
ggccagcctggaatgc

SEQ ID NO: 52 - DNA, 16 bp, synthetic construct
  misc_feature 1..16: note = Synthetic
  source 1..16: mol_type = other DNA
gggccagcctggaatg

SEQ ID NO: 53 - DNA, 16 bp, synthetic construct
  misc_feature 1..16: note = Synthetic
  source 1..16: mol_type = other DNA
ggggccagcctggaat

SEQ ID NO: 54 - DNA, 16 bp, synthetic construct
  misc_feature 1..16: note = Synthetic
  source 1..16: mol_type = other DNA
tggggccagcctggaa

SEQ ID NO: 55 - DNA, 16 bp, synthetic construct
  misc_feature 1..16: note = Synthetic
  source 1..16: mol_type = other DNA
gtggggccagcctgga

SEQ ID NO: 56 - DNA, 16 bp, synthetic construct
  misc_feature 1..16: note = Synthetic
  source 1..16: mol_type = other DNA
ggtggggccagcctgg

SEQ ID NO: 57 - DNA, 16 bp, synthetic construct
  misc_feature 1..16: note = Synthetic
  source 1..16: mol_type = other DNA
aggtggggccagcctg

SEQ ID NO: 58 - DNA, 16 bp, synthetic construct
  misc_feature 1..16: note = Synthetic
  source 1..16: mol_type = other DNA
gaggtggggccagcct

SEQ ID NO: 59 - DNA, 16 bp, synthetic construct
  misc_feature 1..16: note = Synthetic
  source 1..16: mol_type = other DNA
agaggtggggccagcc

SEQ ID NO: 60 - DNA, 16 bp, synthetic construct
  misc_feature 1..16: note = Synthetic
  source 1..16: mol_type = other DNA
tagaggtggggccagc

SEQ ID NO: 61 - DNA, 16 bp, synthetic construct
  misc_feature 1..16: note = Synthetic
  source 1..16: mol_type = other DNA
atagaggtggggccag

SEQ ID NO: 62 - DNA, 16 bp, synthetic construct
  misc_feature 1..16: note = Synthetic
  source 1..16: mol_type = other DNA
tatagaggtggggcca

SEQ ID NO: 63 - DNA, 16 bp, synthetic construct
  misc_feature 1..16: note = Synthetic
  source 1..16: mol_type = other DNA
atatagaggtggggcc

SEQ ID NO: 64 - DNA, 16 bp, synthetic construct
  misc_feature 1..16: note = Synthetic
  source 1..16: mol_type = other DNA
aatatagaggtggggc

SEQ ID NO: 65 - DNA, 16 bp, synthetic construct
  misc_feature 1..16: note = Synthetic
  source 1..16: mol_type = other DNA
caatatagaggtgggg

SEQ ID NO: 66 - DNA, 16 bp, synthetic construct
  misc_feature 1..16: note = Synthetic
  source 1..16: mol_type = other DNA
tcaatatagaggtggg

SEQ ID NO: 67 - DNA, 16 bp, synthetic construct
  misc_feature 1..16: note = Synthetic
  source 1..16: mol_type = other DNA
atcaatatagaggtgg

SEQ ID NO: 68 - DNA, 16 bp, synthetic construct
  misc_feature 1..16: note = Synthetic
  source 1..16: mol_type = other DNA
tatcaatatagaggtg

SEQ ID NO: 69 - DNA, 16 bp, synthetic construct
  misc_feature 1..16: note = Synthetic
  source 1..16: mol_type = other DNA
ttatcaatatagaggt

SEQ ID NO: 70 - DNA, 16 bp, synthetic construct
  misc_feature 1..16: note = Synthetic
  source 1..16: mol_type = other DNA
cttatcaatatagagg

SEQ ID NO: 71 - DNA, 16 bp, synthetic construct
  misc_feature 1..16: note = Synthetic
  source 1..16: mol_type = other DNA
acttatcaatatagag

SEQ ID NO: 72 - DNA, 16 bp, synthetic construct
  misc_feature 1..16: note = Synthetic
  source 1..16: mol_type = other DNA
tacttatcaatataga

SEQ ID NO: 73 - DNA, 16 bp, synthetic construct
  misc_feature 1..16: note = Synthetic
  source 1..16: mol_type = other DNA
ctacttatcaatatag

SEQ ID NO: 74 - DNA, 16 bp, synthetic construct
  misc_feature 1..16: note = Synthetic
  source 1..16: mol_type = other DNA
gctacttatcaatata

SEQ ID NO: 75 - DNA, 16 bp, synthetic construct
  misc_feature 1..16: note = Synthetic
  source 1..16: mol_type = other DNA
ggctacttatcaatat

SEQ ID NO: 76 - DNA, 16 bp, synthetic construct
  misc_feature 1..16: note = Synthetic
  source 1..16: mol_type = other DNA
tggctacttatcaata

SEQ ID NO: 77 - DNA, 16 bp, synthetic construct
  misc_feature 1..16: note = Synthetic
  source 1..16: mol_type = other DNA
ttggctacttatcaat

SEQ ID NO: 78 - DNA, 16 bp, synthetic construct
  misc_feature 1..16: note = Synthetic
  source 1..16: mol_type = other DNA
attggctacttatcaa

SEQ ID NO: 79 - DNA, 16 bp, synthetic construct
  misc_feature 1..16: note = Synthetic
  source 1..16: mol_type = other DNA
cattggctacttatca

SEQ ID NO: 80 - DNA, 16 bp, synthetic construct
  misc_feature 1..16: note = Synthetic
  source 1..16: mol_type = other DNA
ccattggctacttatc

SEQ ID NO: 81 - DNA, 16 bp, synthetic construct
  misc_feature 1..16: note = Synthetic
  source 1..16: mol_type = other DNA
cccattggctacttat

SEQ ID NO: 82 - DNA, 16 bp, synthetic construct
  misc_feature 1..16: note = Synthetic
  source 1..16: mol_type = other DNA
tcccattggctactta

SEQ ID NO: 83 - DNA, 16 bp, synthetic construct
  misc_feature 1..16: note = Synthetic
  source 1..16: mol_type = other DNA
ctcccattggctactt

SEQ ID NO: 84 - DNA, 16 bp, synthetic construct
  misc_feature 1..16: note = Synthetic
  source 1..16: mol_type = other DNA
gctcccattggctact

SEQ ID NO: 85 - DNA, 16 bp, synthetic construct
  misc_feature 1..16: note = Synthetic
  source 1..16: mol_type = other DNA
cgctcccattggctac

SEQ ID NO: 86 - DNA, 16 bp, synthetic construct
  misc_feature 1..16: note = Synthetic
  source 1..16: mol_type = other DNA
ccgctcccattggcta

SEQ ID NO: 87 - DNA, 16 bp, synthetic construct
  misc_feature 1..16: note = Synthetic
  source 1..16: mol_type = other DNA
cccgctcccattggct

SEQ ID NO: 88 - DNA, 16 bp, synthetic construct
  misc_feature 1..16: note = Synthetic
  source 1..16: mol_type = other DNA
acccgctcccattggc

SEQ ID NO: 89 - DNA, 16 bp, synthetic construct
  misc_feature 1..16: note = Synthetic
  source 1..16: mol_type = other DNA
tacccgctcccattgg

SEQ ID NO: 90 - DNA, 16 bp, synthetic construct
  misc_feature 1..16: note = Synthetic
  source 1..16: mol_type = other DNA
ctacccgctcccattg

SEQ ID NO: 91 - DNA, 16 bp, synthetic construct
  misc_feature 1..16: note = Synthetic
  source 1..16: mol_type = other DNA
gctacccgctcccatt

SEQ ID NO: 92 - DNA, 16 bp, synthetic construct
  misc_feature 1..16: note = Synthetic
  source 1..16: mol_type = other DNA
ggctacccgctcccat

SEQ ID NO: 93 - DNA, 16 bp, synthetic construct
  misc_feature 1..16: note = Synthetic
  source 1..16: mol_type = other DNA
gggctacccgctccca

SEQ ID NO: 94 - DNA, 16 bp, synthetic construct
  misc_feature 1..16: note = Synthetic
  source 1..16: mol_type = other DNA
agggctacccgctccc

SEQ ID NO: 95 - DNA, 16 bp, synthetic construct
  misc_feature 1..16: note = Synthetic
  source 1..16: mol_type = other DNA
cagggctacccgctcc

SEQ ID NO: 96 - DNA, 16 bp, synthetic construct
  misc_feature 1..16: note = Synthetic
  source 1..16: mol_type = other DNA
tcagggctacccgctc

SEQ ID NO: 97 - DNA, 16 bp, synthetic construct
  misc_feature 1..16: note = Synthetic
  source 1..16: mol_type = other DNA
atcagggctacccgct

SEQ ID NO: 98 - DNA, 16 bp, synthetic construct
  misc_feature 1..16: note = Synthetic
  source 1..16: mol_type = other DNA
gatcagggctacccgc

SEQ ID NO: 99 - DNA, 16 bp, synthetic construct
  misc_feature 1..16: note = Synthetic
  source 1..16: mol_type = other DNA
ggatcagggctacccg

SEQ ID NO: 100 - DNA, 16 bp, synthetic construct
  misc_feature 1..16: note = Synthetic
  source 1..16: mol_type = other DNA
gggatcagggctaccc

SEQ ID NO: 101 - DNA, 16 bp, synthetic construct
  misc_feature 1..16: note = Synthetic
  source 1..16: mol_type = other DNA
agggatcagggctacc

SEQ ID NO: 102 - DNA, 16 bp, synthetic construct
  misc_feature 1..16: note = Synthetic
  source 1..16: mol_type = other DNA
cagggatcagggctac

SEQ ID NO: 103 - DNA, 16 bp, synthetic construct
  misc_feature 1..16: note = Synthetic
  source 1..16: mol_type = other DNA
ccagggatcagggcta

SEQ ID NO: 104 - DNA, 16 bp, synthetic construct
  misc_feature 1..16: note = Synthetic
  source 1..16: mol_type = other DNA
gccagggatcagggct

SEQ ID NO: 105 - DNA, 16 bp, synthetic construct
  misc_feature 1..16: note = Synthetic
  source 1..16: mol_type = other DNA
ggccagggatcagggc

SEQ ID NO: 106 - DNA, 16 bp, synthetic construct
  misc_feature 1..16: note = Synthetic
  source 1..16: mol_type = other DNA
tggccagggatcaggg

SEQ ID NO: 107 - DNA, 16 bp, synthetic construct
  misc_feature 1..16: note = Synthetic
  source 1..16: mol_type = other DNA
ttggccagggatcagg

SEQ ID NO: 108 - DNA, 16 bp, synthetic construct
  misc_feature 1..16: note = Synthetic
  source 1..16: mol_type = other DNA
attggccagggatcag

SEQ ID NO: 109 - DNA, 16 bp, synthetic construct
  misc_feature 1..16: note = Synthetic
  source 1..16: mol_type = other DNA
cattggccagggatca

SEQ ID NO: 110 - DNA, 16 bp, synthetic construct
  misc_feature 1..16: note = Synthetic
  source 1..16: mol_type = other DNA
ccattggccagggatc

SEQ ID NO: 111 - DNA, 16 bp, synthetic construct
  misc_feature 1..16: note = Synthetic
  source 1..16: mol_type = other DNA
tccattggccagggat

SEQ ID NO: 112 - DNA, 16 bp, synthetic construct
  misc_feature 1..16: note = Synthetic
  source 1..16: mol_type = other DNA
ttccattggccaggga

SEQ ID NO: 113 - DNA, 16 bp, synthetic construct
  misc_feature 1..16: note = Synthetic
  source 1..16: mol_type = other DNA
tttccattggccaggg

SEQ ID NO: 114 - DNA, 16 bp, synthetic construct
  misc_feature 1..16: note = Synthetic
  source 1..16: mol_type = other DNA
gtttccattggccagg

SEQ ID NO: 115 - DNA, 16 bp, synthetic construct
  misc_feature 1..16: note = Synthetic
  source 1..16: mol_type = other DNA
agtttccattggccag

SEQ ID NO: 116 - DNA, 16 bp, synthetic construct
  misc_feature 1..16: note = Synthetic
  source 1..16: mol_type = other DNA
cagtttccattggcca

SEQ ID NO: 117 - DNA, 16 bp, synthetic construct
  misc_feature 1..16: note = Synthetic
  source 1..16: mol_type = other DNA
tcagtttccattggcc

SEQ ID NO: 118 - DNA, 16 bp, synthetic construct
  misc_feature 1..16: note = Synthetic
  source 1..16: mol_type = other DNA
ctcagtttccattggc

SEQ ID NO: 119 - DNA, 16 bp, synthetic construct
  misc_feature 1..16: note = Synthetic
  source 1..16: mol_type = other DNA
cctcagtttccattgg

SEQ ID NO: 120 - DNA, 16 bp, synthetic construct
  misc_feature 1..16: note = Synthetic
  source 1..16: mol_type = other DNA
acctcagtttccattg

SEQ ID NO: 121 - DNA, 16 bp, synthetic construct
  misc_feature 1..16: note = Synthetic
  source 1..16: mol_type = other DNA
tacctcagtttccatt

SEQ ID NO: 122 - DNA, 16 bp, synthetic construct
  misc_feature 1..16: note = Synthetic
  source 1..16: mol_type = other DNA
ctacctcagtttccat

SEQ ID NO: 123 - DNA, 16 bp, synthetic construct
  misc_feature 1..16: note = Synthetic
  source 1..16: mol_type = other DNA
cctacctcagtttcca

SEQ ID NO: 124 - DNA, 16 bp, synthetic construct
  misc_feature 1..16: note = Synthetic
  source 1..16: mol_type = other DNA
gcctacctcagtttcc

SEQ ID NO: 125 - DNA, 16 bp, synthetic construct
  misc_feature 1..16: note = Synthetic
  source 1..16: mol_type = other DNA
cgcctacctcagtttc

SEQ ID NO: 126 - DNA, 16 bp, synthetic construct
  misc_feature 1..16: note = Synthetic
  source 1..16: mol_type = other DNA
ccgcctacctcagttt

SEQ ID NO: 127 - DNA, 16 bp, synthetic construct
  misc_feature 1..16: note = Synthetic
  source 1..16: mol_type = other DNA
cccgcctacctcagtt

SEQ ID NO: 128 - DNA, 16 bp, synthetic construct
  misc_feature 1..16: note = Synthetic
  source 1..16: mol_type = other DNA
acccgcctacctcagt

SEQ ID NO: 129 - DNA, 16 bp, synthetic construct
  misc_feature 1..16: note = Synthetic
  source 1..16: mol_type = other DNA
gacccgcctacctcag

SEQ ID NO: 130 - DNA, 16 bp, synthetic construct
  misc_feature 1..16: note = Synthetic
  source 1..16: mol_type = other DNA
tgacccgcctacctca

SEQ ID NO: 131 - DNA, 16 bp, synthetic construct
  misc_feature 1..16: note = Synthetic
  source 1..16: mol_type = other DNA
atgacccgcctacctc

SEQ ID NO: 132 - DNA, 16 bp, synthetic construct
  misc_feature 1..16: note = Synthetic
  source 1..16: mol_type = other DNA
gatgacccgcctacct

SEQ ID NO: 133 - DNA, 16 bp, synthetic construct
  misc_feature 1..16: note = Synthetic
  source 1..16: mol_type = other DNA
cgatgacccgcctacc

SEQ ID NO: 134 - DNA, 16 bp, synthetic construct
  misc_feature 1..16: note = Synthetic
  source 1..16: mol_type = other DNA
gcgatgacccgcctac

SEQ ID NO: 135 - DNA, 16 bp, synthetic construct
  misc_feature 1..16: note = Synthetic
  source 1..16: mol_type = other DNA
cgcgatgacccgccta

SEQ ID NO: 136 - DNA, 16 bp, synthetic construct
  misc_feature 1..16: note = Synthetic
  source 1..16: mol_type = other DNA
gcgcgatgacccgcct

SEQ ID NO: 137 - DNA, 16 bp, synthetic construct
  misc_feature 1..16: note = Synthetic
  source 1..16: mol_type = other DNA
agcgcgatgacccgcc

SEQ ID NO: 138 - DNA, 16 bp, synthetic construct
  misc_feature 1..16: note = Synthetic
  source 1..16: mol_type = other DNA
cagcgcgatgacccgc

SEQ ID NO: 139 - DNA, 16 bp, synthetic construct
  misc_feature 1..16: note = Synthetic
  source 1..16: mol_type = other DNA
ccagcgcgatgacccg

SEQ ID NO: 140 - DNA, 16 bp, synthetic construct
  misc_feature 1..16: note = Synthetic
  source 1..16: mol_type = other DNA
cccagcgcgatgaccc

SEQ ID NO: 141 - DNA, 16 bp, synthetic construct
  misc_feature 1..16: note = Synthetic
  source 1..16: mol_type = other DNA
ccccagcgcgatgacc

SEQ ID NO: 142 - DNA, 16 bp, synthetic construct
  misc_feature 1..16: note = Synthetic
  source 1..16: mol_type = other DNA
accccagcgcgatgac

SEQ ID NO: 143 - DNA, 16 bp, synthetic construct
  misc_feature 1..16: note = Synthetic
  source 1..16: mol_type = other DNA
gaccccagcgcgatga

SEQ ID NO: 144 - DNA, 16 bp, synthetic construct
  misc_feature 1..16: note = Synthetic
  source 1..16: mol_type = other DNA
agaccccagcgcgatg

SEQ ID NO: 145 - DNA, 16 bp, synthetic construct
  misc_feature 1..16: note = Synthetic
  source 1..16: mol_type = other DNA
cagaccccagcgcgat

SEQ ID NO: 146 - DNA, 16 bp, synthetic construct
  misc_feature 1..16: note = Synthetic
  source 1..16: mol_type = other DNA
acagaccccagcgcga

SEQ ID NO: 147 - DNA, 16 bp, synthetic construct
  misc_feature 1..16: note = Synthetic
  source 1..16: mol_type = other DNA
tacagaccccagcgcg

SEQ ID NO: 148 - DNA, 16 bp, synthetic construct
  misc_feature 1..16: note = Synthetic
  source 1..16: mol_type = other DNA
ctacagaccccagcgc

SEQ ID NO: 149 - DNA, 16 bp, synthetic construct
  misc_feature 1..16: note = Synthetic
  source 1..16: mol_type = other DNA
actacagaccccagcg

SEQ ID NO: 150 - DNA, 16 bp, synthetic construct
  misc_feature 1..16: note = Synthetic
  source 1..16: mol_type = other DNA
gactacagaccccagc

SEQ ID NO: 151 - DNA, 16 bp, synthetic construct
  misc_feature 1..16: note = Synthetic
  source 1..16: mol_type = other DNA
agactacagaccccag

SEQ ID NO: 152 - DNA, 16 bp, synthetic construct
  misc_feature 1..16: note = Synthetic
  source 1..16: mol_type = other DNA
cagactacagacccca

SEQ ID NO: 153 - DNA, 16 bp, synthetic construct
  misc_feature 1..16: note = Synthetic
  source 1..16: mol_type = other DNA
tcagactacagacccc

SEQ ID NO: 154 - DNA, 16 bp, synthetic construct
  misc_feature 1..16: note = Synthetic
  source 1..16: mol_type = other DNA
ctcagactacagaccc

SEQ ID NO: 155 - DNA, 16 bp, synthetic construct
  misc_feature 1..16: note = Synthetic
  source 1..16: mol_type = other DNA
gctcagactacagacc

SEQ ID NO: 156 - DNA, 16 bp, synthetic construct
  misc_feature 1..16: note = Synthetic
  source 1..16: mol_type = other DNA
cgctcagactacagac

SEQ ID NO: 157 - DNA, 16 bp, synthetic construct
  misc_feature 1..16: note = Synthetic
  source 1..16: mol_type = other DNA
gcgctcagactacaga

SEQ ID NO: 158 - DNA, 16 bp, synthetic construct
  misc_feature 1..16: note = Synthetic
  source 1..16: mol_type = other DNA
agcgctcagactacag

SEQ ID NO: 159 - DNA, 16 bp, synthetic construct
  misc_feature 1..16: note = Synthetic
  source 1..16: mol_type = other DNA
tagcgctcagactaca

SEQ ID NO: 160 - DNA, 16 bp, synthetic construct
  misc_feature 1..16: note = Synthetic
  source 1..16: mol_type = other DNA
gtagcgctcagactac

SEQ ID NO: 161 - DNA, 16 bp, synthetic construct
  misc_feature 1..16: note = Synthetic
  source 1..16: mol_type = other DNA
ggtagcgctcagacta

SEQ ID NO: 162 - DNA, 16 bp, synthetic construct
  misc_feature 1..16: note = Synthetic
  source 1..16: mol_type = other DNA
gggtagcgctcagact

SEQ ID NO: 163 - DNA, 16 bp, synthetic construct
  misc_feature 1..16: note = Synthetic
  source 1..16: mol_type = other DNA
cgggtagcgctcagac

SEQ ID NO: 164 - DNA, 16 bp, synthetic construct
  misc_feature 1..16: note = Synthetic
  source 1..16: mol_type = other DNA
ccgggtagcgctcaga

SEQ ID NO: 165 - DNA, 16 bp, synthetic construct
  misc_feature 1..16: note = Synthetic
  source 1..16: mol_type = other DNA
accgggtagcgctcag

SEQ ID NO: 166 - DNA, 16 bp, synthetic construct
  misc_feature 1..16: note = Synthetic
  source 1..16: mol_type = other DNA
aaccgggtagcgctca

SEQ ID NO: 167 - DNA, 16 bp, synthetic construct
  misc_feature 1..16: note = Synthetic
  source 1..16: mol_type = other DNA
caaccgggtagcgctc

SEQ ID NO: 168 - DNA, 16 bp, synthetic construct
  misc_feature 1..16: note = Synthetic
  source 1..16: mol_type = other DNA
gcaaccgggtagcgct

SEQ ID NO: 169 - DNA, 16 bp, synthetic construct
  misc_feature 1..16: note = Synthetic
  source 1..16: mol_type = other DNA
agcaaccgggtagcgc

SEQ ID NO: 170 - DNA, 16 bp, synthetic construct
  misc_feature 1..16: note = Synthetic
  source 1..16: mol_type = other DNA
cagcaaccgggtagcg

SEQ ID NO: 171 - DNA, 16 bp, synthetic construct
  misc_feature 1..16: note = Synthetic
  source 1..16: mol_type = other DNA
gcagcaaccgggtagc

SEQ ID NO: 172 - DNA, 16 bp, synthetic construct
  misc_feature 1..16: note = Synthetic
  source 1..16: mol_type = other DNA
agcagcaaccgggtag

SEQ ID NO: 173 - DNA, 16 bp, synthetic construct
  misc_feature 1..16: note = Synthetic
  source 1..16: mol_type = other DNA
cagcagcaaccgggta

SEQ ID NO: 174 - DNA, 16 bp, synthetic construct
  misc_feature 1..16: note = Synthetic
  source 1..16: mol_type = other DNA
gcagcagcaaccgggt

SEQ ID NO: 175 - DNA, 16 bp, synthetic construct
  misc_feature 1..16: note = Synthetic
  source 1..16: mol_type = other DNA
ggcagcagcaaccggg

SEQ ID NO: 176 - DNA, 16 bp, synthetic construct
  misc_feature 1..16: note = Synthetic
  source 1..16: mol_type = other DNA
gggcagcagcaaccgg

SEQ ID NO: 177 - DNA, 16 bp, synthetic construct
  misc_feature 1..16: note = Synthetic
  source 1..16: mol_type = other DNA
tgggcagcagcaaccg

SEQ ID NO: 178 - DNA, 16 bp, synthetic construct
  misc_feature 1..16: note = Synthetic
  source 1..16: mol_type = other DNA
ttgggcagcagcaacc

SEQ ID NO: 179 - DNA, 16 bp, synthetic construct
  misc_feature 1..16: note = Synthetic
  source 1..16: mol_type = other DNA
cttgggcagcagcaac

SEQ ID NO: 180 - DNA, 16 bp, synthetic construct
  misc_feature 1..16: note = Synthetic
  source 1..16: mol_type = other DNA
ccttgggcagcagcaa

SEQ ID NO: 181 - DNA, 16 bp, synthetic construct
  misc_feature 1..16: note = Synthetic
  source 1..16: mol_type = other DNA
tccttgggcagcagca

SEQ ID NO: 182 - DNA, 16 bp, synthetic construct
  misc_feature 1..16: note = Synthetic
  source 1..16: mol_type = other DNA
gtccttgggcagcagc

SEQ ID NO: 183 - DNA, 16 bp, synthetic construct
  misc_feature 1..16: note = Synthetic
  source 1..16: mol_type = other DNA
ggtccttgggcagcag

SEQ ID NO: 184 - DNA, 16 bp, synthetic construct
  misc_feature 1..16: note = Synthetic
  source 1..16: mol_type = other DNA
cggtccttgggcagca

SEQ ID NO: 185 - DNA, 16 bp, synthetic construct
  misc_feature 1..16: note = Synthetic
  source 1..16: mol_type = other DNA
gcggtccttgggcagc

SEQ ID NO: 186 - DNA, 16 bp, synthetic construct
  misc_feature 1..16: note = Synthetic
  source 1..16: mol_type = other DNA
cgcggtccttgggcag

SEQ ID NO: 187 - DNA, 16 bp, synthetic construct
  misc_feature 1..16: note = Synthetic
  source 1..16: mol_type = other DNA
ccgcggtccttgggca

SEQ ID NO: 188 - DNA, 16 bp, synthetic construct
  misc_feature 1..16: note = Synthetic
  source 1..16: mol_type = other DNA
tccgcggtccttgggc

SEQ ID NO: 189 - DNA, 16 bp, synthetic construct
  misc_feature 1..16: note = Synthetic
  source 1..16: mol_type = other DNA
ctccgcggtccttggg

SEQ ID NO: 190 - DNA, 16 bp, synthetic construct
  misc_feature 1..16: note = Synthetic
  source 1..16: mol_type = other DNA
actccgcggtccttgg

SEQ ID NO: 191 - DNA, 16 bp, synthetic construct
  misc_feature 1..16: note = Synthetic
  source 1..16: mol_type = other DNA
gactccgcggtccttg

SEQ ID NO: 192 - DNA, 16 bp, synthetic construct
  misc_feature 1..16: note = Synthetic
  source 1..16: mol_type = other DNA
cgactccgcggtcctt

SEQ ID NO: 193 - DNA, 16 bp, synthetic construct
  misc_feature 1..16: note = Synthetic
  source 1..16: mol_type = other DNA
ccgactccgcggtcct

SEQ ID NO: 194 - DNA, 16 bp, synthetic construct
  misc_feature 1..16: note = Synthetic
  source 1..16: mol_type = other DNA
tccgactccgcggtcc

SEQ ID NO: 195 - DNA, 16 bp, synthetic construct
  misc_feature 1..16: note = Synthetic
  source 1..16: mol_type = other DNA
gtccgactccgcggtc

SEQ ID NO: 196 - DNA, 16 bp, synthetic construct
  misc_feature 1..16: note = Synthetic
  source 1..16: mol_type = other DNA
cgtccgactccgcggt

SEQ ID NO: 197 - DNA, 16 bp, synthetic construct
  misc_feature 1..16: note = Synthetic
  source 1..16: mol_type = other DNA
gcgtccgactccgcgg

SEQ ID NO: 198 - DNA, 16 bp, synthetic construct
  misc_feature 1..16: note = Synthetic
  source 1..16: mol_type = other DNA
tgcgtccgactccgcg

SEQ ID NO: 199 - DNA, 16 bp, synthetic construct
  misc_feature 1..16: note = Synthetic
  source 1..16: mol_type = other DNA
ctgcgtccgactccgc

SEQ ID NO: 200 - DNA, 16 bp, synthetic construct
  misc_feature 1..16: note = Synthetic
  source 1..16: mol_type = other DNA
cctgcgtccgactccg

SEQ ID NO: 201 - DNA, 16 bp, synthetic construct
  misc_feature 1..16: note = Synthetic
  source 1..16: mol_type = other DNA
gcctgcgtccgactcc

SEQ ID NO: 202 - DNA, 16 bp, synthetic construct
  misc_feature 1..16: note = Synthetic
  source 1..16: mol_type = other DNA
tgcctgcgtccgactc

SEQ ID NO: 203 - DNA, 16 bp, synthetic construct
  misc_feature 1..16: note = Synthetic
  source 1..16: mol_type = other DNA
ctgcctgcgtccgact

SEQ ID NO: 204 - DNA, 16 bp, synthetic construct
  misc_feature 1..16: note = Synthetic
  source 1..16: mol_type = other DNA
tctgcctgcgtccgac

SEQ ID NO: 205 - DNA, 16 bp, synthetic construct
  misc_feature 1..16: note = Synthetic
  source 1..16: mol_type = other DNA
gtctgcctgcgtccga

SEQ ID NO: 206 - DNA, 16 bp, synthetic construct
  misc_feature 1..16: note = Synthetic
  source 1..16: mol_type = other DNA
ggtctgcctgcgtccg

SEQ ID NO: 207 - DNA, 18 bp, synthetic construct
  misc_feature 1..18: note = Synthetic
  source 1..18: mol_type = other DNA
gctcccattggctactta

SEQ ID NO: 208 - DNA, 18 bp, synthetic construct
  misc_feature 1..18: note = Synthetic
  source 1..18: mol_type = other DNA
cgctcccattggctactt

SEQ ID NO: 209 - DNA, 18 bp, synthetic construct
  misc_feature 1..18: note = Synthetic
  source 1..18: mol_type = other DNA
ccgctcccattggctact

SEQ ID NO: 210 - DNA, 18 bp, synthetic construct
  misc_feature 1..18: note = Synthetic
  source 1..18: mol_type = other DNA
cccgctcccattggctac

SEQ ID NO: 211 - DNA, 18 bp, synthetic construct
  misc_feature 1..18: note = Synthetic
  source 1..18: mol_type = other DNA
acccgctcccattggcta

SEQ ID NO: 212 - DNA, 18 bp, synthetic construct
  misc_feature 1..18: note = Synthetic
  source 1..18: mol_type = other DNA
tacccgctcccattggct

SEQ ID NO: 213 - DNA, 18 bp, synthetic construct
  misc_feature 1..18: note = Synthetic
  source 1..18: mol_type = other DNA
ctacccgctcccattggc

SEQ ID NO: 214 - DNA, 18 bp, synthetic construct
  misc_feature 1..18: note = Synthetic
  source 1..18: mol_type = other DNA
gctacccgctcccattgg

SEQ ID NO: 215 - DNA, 18 bp, synthetic construct
  misc_feature 1..18: note = Synthetic
  source 1..18: mol_type = other DNA
ggctacccgctcccattg

SEQ ID NO: 216 - DNA, 18 bp, synthetic construct
  misc_feature 1..18: note = Synthetic
  source 1..18: mol_type = other DNA
gggctacccgctcccatt

SEQ ID NO: 217 - DNA, 18 bp, synthetic construct
  misc_feature 1..18: note = Synthetic
  source 1..18: mol_type = other DNA
agggctacccgctcccat

SEQ ID NO: 218 - DNA, 18 bp, synthetic construct
  misc_feature 1..18: note = Synthetic
  source 1..18: mol_type = other DNA
cagggctacccgctccca

SEQ ID NO: 219 - DNA, 18 bp, synthetic construct
  misc_feature 1..18: note = Synthetic
  source 1..18: mol_type = other DNA
tcagggctacccgctccc

SEQ ID NO: 220 - DNA, 18 bp, synthetic construct
  misc_feature 1..18: note = Synthetic
  source 1..18: mol_type = other DNA
atcagggctacccgctcc

SEQ ID NO: 221 - DNA, 18 bp, synthetic construct
  misc_feature 1..18: note = Synthetic
  source 1..18: mol_type = other DNA
gatcagggctacccgctc

SEQ ID NO: 222 - DNA, 18 bp, synthetic construct
  misc_feature 1..18: note = Synthetic
  source 1..18: mol_type = other DNA
ggatcagggctacccgct

SEQ ID NO: 223 - DNA, 18 bp, synthetic construct
  misc_feature 1..18: note = Synthetic
  source 1..18: mol_type = other DNA
gggatcagggctacccgc

SEQ ID NO: 224 - DNA, 18 bp, synthetic construct
  misc_feature 1..18: note = Synthetic
  source 1..18: mol_type = other DNA
agggatcagggctacccg

SEQ ID NO: 225 - DNA, 18 bp, synthetic construct
  misc_feature 1..18: note = Synthetic
  source 1..18: mol_type = other DNA
cagggatcagggctaccc

SEQ ID NO: 226 - DNA, 18 bp, synthetic construct
  misc_feature 1..18: note = Synthetic
  source 1..18: mol_type = other DNA
ccagggatcagggctacc

SEQ ID NO: 227 - DNA, 18 bp, synthetic construct
  misc_feature 1..18: note = Synthetic
  source 1..18: mol_type = other DNA
gccagggatcagggctac

SEQ ID NO: 228 - DNA, 18 bp, synthetic construct
  misc_feature 1..18: note = Synthetic
  source 1..18: mol_type = other DNA
ggccagggatcagggcta

SEQ ID NO: 229 - DNA, 18 bp, synthetic construct
  misc_feature 1..18: note = Synthetic
  source 1..18: mol_type = other DNA
tggccagggatcagggct

SEQ ID NO: 230 - DNA, 18 bp, synthetic construct
  misc_feature 1..18: note = Synthetic
  source 1..18: mol_type = other DNA
ttggccagggatcagggc

SEQ ID NO: 231 - DNA, 18 bp, synthetic construct
  misc_feature 1..18: note = Synthetic
  source 1..18: mol_type = other DNA
attggccagggatcaggg

SEQ ID NO: 232 - DNA, 18 bp, synthetic construct
  misc_feature 1..18: note = Synthetic
  source 1..18: mol_type = other DNA
cattggccagggatcagg

SEQ ID NO: 233 - DNA, 18 bp, synthetic construct
  misc_feature 1..18: note = Synthetic
  source 1..18: mol_type = other DNA
ccattggccagggatcag

SEQ ID NO: 234 - DNA, 18 bp, synthetic construct
  misc_feature 1..18: note = Synthetic
  source 1..18: mol_type = other DNA
tccattggccagggatca

SEQ ID NO: 235 - DNA, 18 bp, synthetic construct
  misc_feature 1..18: note = Synthetic
  source 1..18: mol_type = other DNA
ttccattggccagggatc

SEQ ID NO: 236 - DNA, 18 bp, synthetic construct
  misc_feature 1..18: note = Synthetic
  source 1..18: mol_type = other DNA
tttccattggccagggat

SEQ ID NO: 237 - DNA, 18 bp, synthetic construct
  misc_feature 1..18: note = Synthetic
  source 1..18: mol_type = other DNA
gtttccattggccaggga

SEQ ID NO: 238 - DNA, 18 bp, synthetic construct
  misc_feature 1..18: note = Synthetic
  source 1..18: mol_type = other DNA
agtttccattggccaggg

SEQ ID NO: 239 - DNA, 18 bp, synthetic construct
  misc_feature 1..18: note = Synthetic
  source 1..18: mol_type = other DNA
cagtttccattggccagg

SEQ ID NO: 240 - DNA, 18 bp, synthetic construct
  misc_feature 1..18: note = Synthetic
  source 1..18: mol_type = other DNA
tcagtttccattggccag

SEQ ID NO: 241 - DNA, 18 bp, synthetic construct
  misc_feature 1..18: note = Synthetic
  source 1..18: mol_type = other DNA
ctcagtttccattggcca

SEQ ID NO: 242 - DNA, 18 bp, synthetic construct
  misc_feature 1..18: note = Synthetic
  source 1..18: mol_type = other DNA
cctcagtttccattggcc

SEQ ID NO: 243 - DNA, 18 bp, synthetic construct
  misc_feature 1..18: note = Synthetic
  source 1..18: mol_type = other DNA
acctcagtttccattggc

SEQ ID NO: 244 - DNA, 18 bp, synthetic construct
  misc_feature 1..18: note = Synthetic
  source 1..18: mol_type = other DNA
tacctcagtttccattgg

SEQ ID NO: 245 - DNA, 18 bp, synthetic construct
  misc_feature 1..18: note = Synthetic
  source 1..18: mol_type = other DNA
ctacctcagtttccattg

SEQ ID NO: 246 - DNA, 18 bp, synthetic construct
  misc_feature 1..18: note = Synthetic
  source 1..18: mol_type = other DNA
cctacctcagtttccatt

SEQ ID NO: 247 - DNA, 18 bp, synthetic construct
  misc_feature 1..18: note = Synthetic
  source 1..18: mol_type = other DNA
tgcagagtcttcagtact

SEQ ID NO: 248 - DNA, 18 bp, synthetic construct
  misc_feature 1..18: note = Synthetic
  source 1..18: mol_type = other DNA
ggctgcagagtcttcagt

SEQ ID NO: 249 - DNA, 18 bp, synthetic construct
  misc_feature 1..18: note = Synthetic
  source 1..18: mol_type = other DNA
gagggctgcagagtcttc

SEQ ID NO: 250 - DNA, 18 bp, synthetic construct
  misc_feature 1..18: note = Synthetic
  source 1..18: mol_type = other DNA
cccgagggctgcagagtc

SEQ ID NO: 251 - DNA, 18 bp, synthetic construct
  misc_feature 1..18: note = Synthetic
  source 1..18: mol_type = other DNA
ggtcccgagggctgcaga

SEQ ID NO: 252 - DNA, 18 bp, synthetic construct
  misc_feature 1..18: note = Synthetic
  source 1..18: mol_type = other DNA
tggggtcccgagggctgc

SEQ ID NO: 253 - DNA, 18 bp, synthetic construct
  misc_feature 1..18: note = Synthetic
  source 1..18: mol_type = other DNA
gagtggggtcccgagggc

SEQ ID NO: 254 - DNA, 18 bp, synthetic construct
  misc_feature 1..18: note = Synthetic
  source 1..18: mol_type = other DNA
tccgagtggggtcccgag

SEQ ID NO: 255 - DNA, 18 bp, synthetic construct
  misc_feature 1..18: note = Synthetic
  source 1..18: mol_type = other DNA
ccctccgagtggggtccc

SEQ ID NO: 256 - DNA, 18 bp, synthetic construct
  misc_feature 1..18: note = Synthetic
  source 1..18: mol_type = other DNA
gcaccctccgagtggggt

SEQ ID NO: 257 - DNA, 18 bp, synthetic construct
  misc_feature 1..18: note = Synthetic
  source 1..18: mol_type = other DNA
agggcaccctccgagtgg

SEQ ID NO: 258 - DNA, 18 bp, synthetic construct
  misc_feature 1..18: note = Synthetic
  source 1..18: mol_type = other DNA
cagagggcaccctccgag

SEQ ID NO: 259 - DNA, 18 bp, synthetic construct
  misc_feature 1..18: note = Synthetic
  source 1..18: mol_type = other DNA
gagcagagggcaccctcc

SEQ ID NO: 260 - DNA, 18 bp, synthetic construct
  misc_feature 1..18: note = Synthetic
  source 1..18: mol_type = other DNA
cctgagcagagggcaccc

SEQ ID NO: 261 - DNA, 18 bp, synthetic construct
  misc_feature 1..18: note = Synthetic
  source 1..18: mol_type = other DNA
aggcctgagcagagggca

SEQ ID NO: 262 - DNA, 18 bp, synthetic construct
  misc_feature 1..18: note = Synthetic
  source 1..18: mol_type = other DNA
gggaggcctgagcagagg

SEQ ID NO: 263 - DNA, 18 bp, synthetic construct
  misc_feature 1..18: note = Synthetic
  source 1..18: mol_type = other DNA
ctagggaggcctgagcag

SEQ ID NO: 264 - DNA, 18 bp, synthetic construct
  misc_feature 1..18: note = Synthetic
  source 1..18: mol_type = other DNA
gtgctagggaggcctgag

SEQ ID NO: 265 - DNA, 18 bp, synthetic construct
  misc_feature 1..18: note = Synthetic
  source 1..18: mol_type = other DNA
gaggtgctagggaggcct

SEQ ID NO: 266 - DNA, 18 bp, synthetic construct
  misc_feature 1..18: note = Synthetic
  source 1..18: mol_type = other DNA
ggggaggtgctagggagg

SEQ ID NO: 267 - DNA, 18 bp, synthetic construct
  misc_feature 1..18: note = Synthetic
  source 1..18: mol_type = other DNA
tagggggaggtgctaggg

SEQ ID NO: 268 - DNA, 18 bp, synthetic construct
  misc_feature 1..18: note = Synthetic
  source 1..18: mol_type = other DNA
ggttagggggaggtgcta

SEQ ID NO: 269 - DNA, 18 bp, synthetic construct
  misc_feature 1..18: note = Synthetic
  source 1..18: mol_type = other DNA
tttggttagggggaggtg

SEQ ID NO: 270 - DNA, 18 bp, synthetic construct
  misc_feature 1..18: note = Synthetic
  source 1..18: mol_type = other DNA
gaatttggttagggggag

SEQ ID NO: 271 - DNA, 18 bp, synthetic construct
  misc_feature 1..18: note = Synthetic
  source 1..18: mol_type = other DNA
ggagaatttggttagggg

SEQ ID NO: 272 - DNA, 18 bp, synthetic construct
  misc_feature 1..18: note = Synthetic
  source 1..18: mol_type = other DNA
cagggagaatttggttag

SEQ ID NO: 273 - DNA, 18 bp, synthetic construct
  misc_feature 1..18: note = Synthetic
  source 1..18: mol_type = other DNA
gtccagggagaatttggt

SEQ ID NO: 274 - DNA, 18 bp, synthetic construct
  misc_feature 1..18: note = Synthetic
  source 1..18: mol_type = other DNA
ggggtccagggagaattt

SEQ ID NO: 275 - DNA, 18 bp, synthetic construct
  misc_feature 1..18: note = Synthetic
  source 1..18: mol_type = other DNA
aatggggtccagggagaa

SEQ ID NO: 276 - DNA, 18 bp, synthetic construct
  misc_feature 1..18: note = Synthetic
  source 1..18: mol_type = other DNA
cagaatggggtccaggga

SEQ ID NO: 277 - DNA, 18 bp, synthetic construct
  misc_feature 1..18: note = Synthetic
  source 1..18: mol_type = other DNA
gctcagaatggggtccag

SEQ ID NO: 278 - DNA, 18 bp, synthetic construct
  misc_feature 1..18: note = Synthetic
  source 1..18: mol_type = other DNA
ggagctcagaatggggtc

SEQ ID NO: 279 - DNA, 18 bp, synthetic construct
  misc_feature 1..18: note = Synthetic
  source 1..18: mol_type = other DNA
tggggagctcagaatggg

SEQ ID NO: 280 - DNA, 18 bp, synthetic construct
  misc_feature 1..18: note = Synthetic
  source 1..18: mol_type = other DNA
tgatggggagctcagaat

SEQ ID NO: 281 - DNA, 18 bp, synthetic construct
  misc_feature 1..18: note = Synthetic
  source 1..18: mol_type = other DNA
tggtgatggggagctcag

SEQ ID NO: 282 - DNA, 18 bp, synthetic construct
  misc_feature 1..18: note = Synthetic
  source 1..18: mol_type = other DNA
ccatggtgatggggagct

SEQ ID NO: 283 - DNA, 18 bp, synthetic construct
  misc_feature 1..18: note = Synthetic
  source 1..18: mol_type = other DNA
ctcccatggtgatgggga

SEQ ID NO: 284 - DNA, 18 bp, synthetic construct
  misc_feature 1..18: note = Synthetic
  source 1..18: mol_type = other DNA
cacctcccatggtgatgg

SEQ ID NO: 285 - DNA, 18 bp, synthetic construct
  misc_feature 1..18: note = Synthetic
  source 1..18: mol_type = other DNA
ccccacctcccatggtga

SEQ ID NO: 286 - DNA, 18 bp, synthetic construct
  misc_feature 1..18: note = Synthetic
  source 1..18: mol_type = other DNA
aggccccacctcccatgg

SEQ ID NO: 287 - DNA, 18 bp, synthetic construct
  misc_feature 1..18: note = Synthetic
  source 1..18: mol_type = other DNA
ttgaggccccacctccca

SEQ ID NO: 288 - DNA, 18 bp, synthetic construct
  misc_feature 1..18: note = Synthetic
  source 1..18: mol_type = other DNA
agattgaggccccacctc

SEQ ID NO: 289 - DNA, 18 bp, synthetic construct
  misc_feature 1..18: note = Synthetic
  source 1..18: mol_type = other DNA
cttagattgaggccccac

SEQ ID NO: 290 - DNA, 18 bp, synthetic construct
  misc_feature 1..18: note = Synthetic
  source 1..18: mol_type = other DNA
ggccttagattgaggccc

SEQ ID NO: 291 - DNA, 18 bp, synthetic construct
  misc_feature 1..18: note = Synthetic
  source 1..18: mol_type = other DNA
gaaggccttagattgagg

SEQ ID NO: 292 - DNA, 18 bp, synthetic construct
  misc_feature 1..18: note = Synthetic
  source 1..18: mol_type = other DNA
agggaaggccttagattg

SEQ ID NO: 293 - DNA, 18 bp, synthetic construct
  misc_feature 1..18: note = Synthetic
  source 1..18: mol_type = other DNA
gacagggaaggccttaga

SEQ ID NO: 294 - DNA, 18 bp, synthetic construct
  misc_feature 1..18: note = Synthetic
  source 1..18: mol_type = other DNA
tctgacagggaaggcctt

SEQ ID NO: 295 - DNA, 18 bp, synthetic construct
  misc_feature 1..18: note = Synthetic
  source 1..18: mol_type = other DNA
ccttctgacagggaaggc

SEQ ID NO: 296 - DNA, 18 bp, synthetic construct
  misc_feature 1..18: note = Synthetic
  source 1..18: mol_type = other DNA
cccccttctgacagggaa

SEQ ID NO: 297 - DNA, 18 bp, synthetic construct
  misc_feature 1..18: note = Synthetic
  source 1..18: mol_type = other DNA
caacccccttctgacagg

SEQ ID NO: 298 - DNA, 18 bp, synthetic construct
  misc_feature 1..18: note = Synthetic
  source 1..18: mol_type = other DNA
ccacaacccccttctgac

SEQ ID NO: 299 - DNA, 18 bp, synthetic construct
  misc_feature 1..18: note = Synthetic
  source 1..18: mol_type = other DNA
ttgccacaacccccttct

SEQ ID NO: 300 - DNA, 18 bp, synthetic construct
  misc_feature 1..18: note = Synthetic
  source 1..18: mol_type = other DNA
cttttgccacaaccccct

SEQ ID NO: 301 - DNA, 18 bp, synthetic construct
  misc_feature 1..18: note = Synthetic
  source 1..18: mol_type = other DNA
tggcttttgccacaaccc

SEQ ID NO: 302 - DNA, 18 bp, synthetic construct
  misc_feature 1..18: note = Synthetic
  source 1..18: mol_type = other DNA
atgtggcttttgccacaa

SEQ ID NO: 303 - DNA, 18 bp, synthetic construct
  misc_feature 1..18: note = Synthetic
  source 1..18: mol_type = other DNA
gtaatgtggcttttgcca

SEQ ID NO: 304 - DNA, 18 bp, synthetic construct
  misc_feature 1..18: note = Synthetic
  source 1..18: mol_type = other DNA
cttgtaatgtggcttttg

SEQ ID NO: 305 - DNA, 18 bp, synthetic construct
  misc_feature 1..18: note = Synthetic
  source 1..18: mol_type = other DNA
cagcttgtaatgtggctt

SEQ ID NO: 306 - DNA, 18 bp, synthetic construct
  misc_feature 1..18: note = Synthetic
  source 1..18: mol_type = other DNA
tggcagcttgtaatgtgg

SEQ ID NO: 307 - DNA, 18 bp, synthetic construct
  misc_feature 1..18: note = Synthetic
  source 1..18: mol_type = other DNA
ggatggcagcttgtaatg

SEQ ID NO: 308 - DNA, 18 bp, synthetic construct
  misc_feature 1..18: note = Synthetic
  source 1..18: mol_type = other DNA
aggggatggcagcttgta

SEQ ID NO: 309 - DNA, 18 bp, synthetic construct
  misc_feature 1..18: note = Synthetic
  source 1..18: mol_type = other DNA
gggaggggatggcagctt

SEQ ID NO: 310 - DNA, 18 bp, synthetic construct
  misc_feature 1..18: note = Synthetic
  source 1..18: mol_type = other DNA
acggggaggggatggcag

SEQ ID NO: 311 - DNA, 18 bp, synthetic construct
  misc_feature 1..18: note = Synthetic
  source 1..18: mol_type = other DNA
gaaacggggaggggatgg

SEQ ID NO: 312 - DNA, 18 bp, synthetic construct
  misc_feature 1..18: note = Synthetic
  source 1..18: mol_type = other DNA
actgaaacggggagggga

SEQ ID NO: 313 - DNA, 18 bp, synthetic construct
  misc_feature 1..18: note = Synthetic
  source 1..18: mol_type = other DNA
tccactgaaacggggagg

SEQ ID NO: 314 - DNA, 18 bp, synthetic construct
  misc_feature 1..18: note = Synthetic
  source 1..18: mol_type = other DNA
gggtccactgaaacgggg

SEQ ID NO: 315 - DNA, 18 bp, synthetic construct
  misc_feature 1..18: note = Synthetic
  source 1..18: mol_type = other DNA
acagggtccactgaaacg

SEQ ID NO: 316 - DNA, 18 bp, synthetic construct
  misc_feature 1..18: note = Synthetic
  source 1..18: mol_type = other DNA
gccacagggtccactgaa

SEQ ID NO: 317 - DNA, 18 bp, synthetic construct
  misc_feature 1..18: note = Synthetic
  source 1..18: mol_type = other DNA
ctggccacagggtccact

SEQ ID NO: 318 - DNA, 18 bp, synthetic construct
  misc_feature 1..18: note = Synthetic
  source 1..18: mol_type = other DNA
cacctggccacagggtcc

SEQ ID NO: 319 - DNA, 18 bp, synthetic construct
  misc_feature 1..18: note = Synthetic
  source 1..18: mol_type = other DNA
aagcacctggccacaggg

SEQ ID NO: 320 - DNA, 18 bp, synthetic construct
  misc_feature 1..18: note = Synthetic
  source 1..18: mol_type = other DNA
gaaaagcacctggccaca

SEQ ID NO: 321 - DNA, 18 bp, synthetic construct
  misc_feature 1..18: note = Synthetic
  source 1..18: mol_type = other DNA
agggaaaagcacctggcc

SEQ ID NO: 322 - DNA, 18 bp, synthetic construct
  misc_feature 1..18: note = Synthetic
  source 1..18: mol_type = other DNA
gatagggaaaagcacctg

SEQ ID NO: 323 - DNA, 18 bp, synthetic construct
  misc_feature 1..18: note = Synthetic
  source 1..18: mol_type = other DNA
gtggatagggaaaagcac

SEQ ID NO: 324 - DNA, 18 bp, synthetic construct
  misc_feature 1..18: note = Synthetic
  source 1..18: mol_type = other DNA
cctgtggatagggaaaag

SEQ ID NO: 325 - DNA, 18 bp, synthetic construct
  misc_feature 1..18: note = Synthetic
  source 1..18: mol_type = other DNA
acccctgtggatagggaa

SEQ ID NO: 326 - DNA, 18 bp, synthetic construct
  misc_feature 1..18: note = Synthetic
  source 1..18: mol_type = other DNA
aacacccctgtggatagg

SEQ ID NO: 327 - DNA, 18 bp, synthetic construct
  misc_feature 1..18: note = Synthetic
  source 1..18: mol_type = other DNA
acaaacacccctgtggat

SEQ ID NO: 328 - DNA, 18 bp, synthetic construct
  misc_feature 1..18: note = Synthetic
  source 1..18: mol_type = other DNA
cacacaaacacccctgtg

SEQ ID NO: 329 - DNA, 18 bp, synthetic construct
  misc_feature 1..18: note = Synthetic
  source 1..18: mol_type = other DNA
acacacacaaacacccct

SEQ ID NO: 330 - DNA, 18 bp, synthetic construct
  misc_feature 1..18: note = Synthetic
  source 1..18: mol_type = other DNA
cgcacacacacaaacacc

SEQ ID NO: 331 - DNA, 18 bp, synthetic construct
  misc_feature 1..18: note = Synthetic
  source 1..18: mol_type = other DNA
acgcgcacacacacaaac

SEQ ID NO: 332 - DNA, 18 bp, synthetic construct
  misc_feature 1..18: note = Synthetic
  source 1..18: mol_type = other DNA
cacacgcgcacacacaca

SEQ ID NO: 333 - DNA, 18 bp, synthetic construct
  misc_feature 1..18: note = Synthetic
  source 1..18: mol_type = other DNA
acgcacacgcgcacacac

SEQ ID NO: 334 - DNA, 18 bp, synthetic construct
  misc_feature 1..18: note = Synthetic
  source 1..18: mol_type = other DNA
gaaacgcacacgcgcaca

SEQ ID NO: 335 - DNA, 18 bp, synthetic construct
  misc_feature 1..18: note = Synthetic
  source 1..18: mol_type = other DNA
attgaaacgcacacgcgc

SEQ ID NO: 336 - DNA, 18 bp, synthetic construct
  misc_feature 1..18: note = Synthetic
  source 1..18: mol_type = other DNA
tttattgaaacgcacacg

SEQ ID NO: 337 - DNA, 18 bp, synthetic construct
  misc_feature 1..18: note = Synthetic
  source 1..18: mol_type = other DNA
aactttattgaaacgcac

SEQ ID NO: 338 - DNA, 18 bp, synthetic construct
  misc_feature 1..18: note = Synthetic
  source 1..18: mol_type = other DNA
acaaactttattgaaacg

SEQ ID NO: 339 - DNA, 18 bp, synthetic construct
  misc_feature 1..18: note = Synthetic
  source 1..18: mol_type = other DNA
tgtacaaactttattgaa

SEQ ID NO: 340 - DNA, 18 bp, synthetic construct
  misc_feature 1..18: note = Synthetic
  source 1..18: mol_type = other DNA
aagtgtacaaactttatt

SEQ ID NO: 341 - DNA, 18 bp, synthetic construct
  misc_feature 1..18: note = Synthetic
  source 1..18: mol_type = other DNA
agaaagtgtacaaacttt

SEQ ID NO: 342 - DNA, 18 bp, synthetic construct
  misc_feature 1..18: note = Synthetic
  source 1..18: mol_type = other DNA
ttaagaaagtgtacaaac

SEQ ID NO: 343 - DNA, 16 bp, synthetic construct
  misc_feature 1..16: note = Synthetic
  source 1..16: mol_type = other DNA
ggcgagaggaagcagg

SEQ ID NO: 344 - DNA, 16 bp, synthetic construct
  misc_feature 1..16: note = Synthetic
  source 1..16: mol_type = other DNA
gcgagaggaagcaggg

SEQ ID NO: 345 - DNA, 16 bp, synthetic construct
  misc_feature 1..16: note = Synthetic
  source 1..16: mol_type = other DNA
cgagaggaagcaggga

SEQ ID NO: 346 - DNA, 16 bp, synthetic construct
  misc_feature 1..16: note = Synthetic
  source 1..16: mol_type = other DNA
gagaggaagcagggag

SEQ ID NO: 347 - DNA, 16 bp, synthetic construct
  misc_feature 1..16: note = Synthetic
  source 1..16: mol_type = other DNA
agaggaagcagggagg

SEQ ID NO: 348 - DNA, 16 bp, synthetic construct
  misc_feature 1..16: note = Synthetic
  source 1..16: mol_type = other DNA
gaggaagcagggagga

SEQ ID NO: 349 - DNA, 16 bp, synthetic construct
  misc_feature 1..16: note = Synthetic
  source 1..16: mol_type = other DNA
aggaagcagggaggag

SEQ ID NO: 350 - DNA, 16 bp, synthetic construct
  misc_feature 1..16: note = Synthetic
  source 1..16: mol_type = other DNA
ggaagcagggaggaga

SEQ ID NO: 351 - DNA, 16 bp, synthetic construct
  misc_feature 1..16: note = Synthetic
  source 1..16: mol_type = other DNA
gaagcagggaggagag

SEQ ID NO: 352 - DNA, 16 bp, synthetic construct
  misc_feature 1..16: note = Synthetic
  source 1..16: mol_type = other DNA
aagcagggaggagagt

SEQ ID NO: 353 - DNA, 16 bp, synthetic construct
  misc_feature 1..16: note = Synthetic
  source 1..16: mol_type = other DNA
agcagggaggagagtg

SEQ ID NO: 354 - DNA, 16 bp, synthetic construct
  misc_feature 1..16: note = Synthetic
  source 1..16: mol_type = other DNA
gcagggaggagagtga

SEQ ID NO: 355 - DNA, 16 bp, synthetic construct
  misc_feature 1..16: note = Synthetic
  source 1..16: mol_type = other DNA
cagggaggagagtgat

SEQ ID NO: 356 - DNA, 16 bp, synthetic construct
  misc_feature 1..16: note = Synthetic
  source 1..16: mol_type = other DNA
agggaggagagtgatt

SEQ ID NO: 357 - DNA, 16 bp, synthetic construct
  misc_feature 1..16: note = Synthetic
  source 1..16: mol_type = other DNA
gggaggagagtgattt

SEQ ID NO: 358 - DNA, 16 bp, synthetic construct
  misc_feature 1..16: note = Synthetic
  source 1..16: mol_type = other DNA
ggaggagagtgatttg

SEQ ID NO: 359 - DNA, 16 bp, synthetic construct
  misc_feature 1..16: note = Synthetic
  source 1..16: mol_type = other DNA
gaggagagtgatttga

SEQ ID NO: 360 - DNA, 16 bp, synthetic construct
  misc_feature 1..16: note = Synthetic
  source 1..16: mol_type = other DNA
aggagagtgatttgag

SEQ ID NO: 361 - DNA, 16 bp, synthetic construct
  misc_feature 1..16: note = Synthetic
  source 1..16: mol_type = other DNA
ggagagtgatttgagt

SEQ ID NO: 362 - DNA, 16 bp, synthetic construct
  misc_feature 1..16: note = Synthetic
  source 1..16: mol_type = other DNA
gagagtgatttgagta

SEQ ID NO: 363 - DNA, 16 bp, synthetic construct
  misc_feature 1..16: note = Synthetic
  source 1..16: mol_type = other DNA
agagtgatttgagtag

SEQ ID NO: 364 - DNA, 16 bp, synthetic construct
  misc_feature 1..16: note = Synthetic
  source 1..16: mol_type = other DNA
gagtgatttgagtaga

SEQ ID NO: 365 - DNA, 16 bp, synthetic construct
  misc_feature 1..16: note = Synthetic
  source 1..16: mol_type = other DNA
agtgatttgagtagaa

SEQ ID NO: 366 - DNA, 16 bp, synthetic construct
  misc_feature 1..16: note = Synthetic
  source 1..16: mol_type = other DNA
gtgatttgagtagaaa

SEQ ID NO: 367 - DNA, 16 bp, synthetic construct
  misc_feature 1..16: note = Synthetic
  source 1..16: mol_type = other DNA
tgatttgagtagaaaa

SEQ ID NO: 368 - DNA, 16 bp, synthetic construct
  misc_feature 1..16: note = Synthetic
  source 1..16: mol_type = other DNA
gatttgagtagaaaag

SEQ ID NO: 369 - DNA, 16 bp, synthetic construct
  misc_feature 1..16: note = Synthetic
  source 1..16: mol_type = other DNA
atttgagtagaaaaga

SEQ ID NO: 370 - DNA, 16 bp, synthetic construct
  misc_feature 1..16: note = Synthetic
  source 1..16: mol_type = other DNA
tttgagtagaaaagaa

SEQ ID NO: 371 - DNA, 16 bp, synthetic construct
  misc_feature 1..16: note = Synthetic
  source 1..16: mol_type = other DNA
ttgagtagaaaagaaa

SEQ ID NO: 372 - DNA, 16 bp, synthetic construct
  misc_feature 1..16: note = Synthetic
  source 1..16: mol_type = other DNA
tgagtagaaaagaaac

SEQ ID NO: 373 - DNA, 16 bp, synthetic construct
  misc_feature 1..16: note = Synthetic
  source 1..16: mol_type = other DNA
gagtagaaaagaaaca

SEQ ID NO: 374 - DNA, 16 bp, synthetic construct
  misc_feature 1..16: note = Synthetic
  source 1..16: mol_type = other DNA
agtagaaaagaaacac

SEQ ID NO: 375 - DNA, 16 bp, synthetic construct
  misc_feature 1..16: note = Synthetic
  source 1..16: mol_type = other DNA
gtagaaaagaaacaca

SEQ ID NO: 376 - DNA, 16 bp, synthetic construct
  misc_feature 1..16: note = Synthetic
  source 1..16: mol_type = other DNA
tagaaaagaaacacag

SEQ ID NO: 377 - DNA, 16 bp, synthetic construct
  misc_feature 1..16: note = Synthetic
  source 1..16: mol_type = other DNA
agaaaagaaacacagc

SEQ ID NO: 378 - DNA, 16 bp, synthetic construct
  misc_feature 1..16: note = Synthetic
  source 1..16: mol_type = other DNA
gaaaagaaacacagca

SEQ ID NO: 379 - DNA, 16 bp, synthetic construct
  misc_feature 1..16: note = Synthetic
  source 1..16: mol_type = other DNA
aaaagaaacacagcat

SEQ ID NO: 380 - DNA, 16 bp, synthetic construct
  misc_feature 1..16: note = Synthetic
  source 1..16: mol_type = other DNA
aaagaaacacagcatt

SEQ ID NO: 381 - DNA, 16 bp, synthetic construct
  misc_feature 1..16: note = Synthetic
  source 1..16: mol_type = other DNA
aagaaacacagcattc

SEQ ID NO: 382 - DNA, 16 bp, synthetic construct
  misc_feature 1..16: note = Synthetic
  source 1..16: mol_type = other DNA
agaaacacagcattcc

SEQ ID NO: 383 - DNA, 16 bp, synthetic construct
  misc_feature 1..16: note = Synthetic
  source 1..16: mol_type = other DNA
gaaacacagcattcca

SEQ ID NO: 384 - DNA, 16 bp, synthetic construct
  misc_feature 1..16: note = Synthetic
  source 1..16: mol_type = other DNA
aaacacagcattccag

SEQ ID NO: 385 - DNA, 16 bp, synthetic construct
  misc_feature 1..16: note = Synthetic
  source 1..16: mol_type = other DNA
aacacagcattccagg

SEQ ID NO: 386 - DNA, 16 bp, synthetic construct
  misc_feature 1..16: note = Synthetic
  source 1..16: mol_type = other DNA
acacagcattccaggc

SEQ ID NO: 387 - DNA, 16 bp, synthetic construct
  misc_feature 1..16: note = Synthetic
  source 1..16: mol_type = other DNA
cacagcattccaggct

SEQ ID NO: 388 - DNA, 16 bp, synthetic construct
  misc_feature 1..16: note = Synthetic
  source 1..16: mol_type = other DNA
acagcattccaggctg

SEQ ID NO: 389 - DNA, 16 bp, synthetic construct
  misc_feature 1..16: note = Synthetic
  source 1..16: mol_type = other DNA
cagcattccaggctgg

SEQ ID NO: 390 - DNA, 16 bp, synthetic construct
  misc_feature 1..16: note = Synthetic
  source 1..16: mol_type = other DNA
agcattccaggctggc

SEQ ID NO: 391 - DNA, 16 bp, synthetic construct
  misc_feature 1..16: note = Synthetic
  source 1..16: mol_type = other DNA
gcattccaggctggcc

SEQ ID NO: 392 - DNA, 16 bp, synthetic construct
  misc_feature 1..16: note = Synthetic
  source 1..16: mol_type = other DNA
cattccaggctggccc

SEQ ID NO: 393 - DNA, 16 bp, synthetic construct
  misc_feature 1..16: note = Synthetic
  source 1..16: mol_type = other DNA
attccaggctggcccc

SEQ ID NO: 394 - DNA, 16 bp, synthetic construct
  misc_feature 1..16: note = Synthetic
  source 1..16: mol_type = other DNA
ttccaggctggcccca

SEQ ID NO: 395 - DNA, 16 bp, synthetic construct
  misc_feature 1..16: note = Synthetic
  source 1..16: mol_type = other DNA
tccaggctggccccac

SEQ ID NO: 396 - DNA, 16 bp, synthetic construct
  misc_feature 1..16: note = Synthetic
  source 1..16: mol_type = other DNA
ccaggctggccccacc

SEQ ID NO: 397 - DNA, 16 bp, synthetic construct
  misc_feature 1..16: note = Synthetic
  source 1..16: mol_type = other DNA
caggctggccccacct

SEQ ID NO: 398 - DNA, 16 bp, synthetic construct
  misc_feature 1..16: note = Synthetic
  source 1..16: mol_type = other DNA
aggctggccccacctc

SEQ ID NO: 399 - DNA, 16 bp, synthetic construct
  misc_feature 1..16: note = Synthetic
  source 1..16: mol_type = other DNA
ggctggccccacctct

SEQ ID NO: 400 - DNA, 16 bp, synthetic construct
  misc_feature 1..16: note = Synthetic
  source 1..16: mol_type = other DNA
gctggccccacctcta

SEQ ID NO: 401 - DNA, 16 bp, synthetic construct
  misc_feature 1..16: note = Synthetic
  source 1..16: mol_type = other DNA
ctggccccacctctat

SEQ ID NO: 402 - DNA, 16 bp, synthetic construct
  misc_feature 1..16: note = Synthetic
  source 1..16: mol_type = other DNA
tggccccacctctata

SEQ ID NO: 403 - DNA, 16 bp, synthetic construct
  misc_feature 1..16: note = Synthetic
  source 1..16: mol_type = other DNA
ggccccacctctatat

SEQ ID NO: 404 - DNA, 16 bp, synthetic construct
  misc_feature 1..16: note = Synthetic
  source 1..16: mol_type = other DNA
gccccacctctatatt

SEQ ID NO: 405 - DNA, 16 bp, synthetic construct
  misc_feature 1..16: note = Synthetic
  source 1..16: mol_type = other DNA
ccccacctctatattg

SEQ ID NO: 406 - DNA, 16 bp, synthetic construct
  misc_feature 1..16: note = Synthetic
  source 1..16: mol_type = other DNA
cccacctctatattga

SEQ ID NO: 407 - DNA, 16 bp, synthetic construct
  misc_feature 1..16: note = Synthetic
  source 1..16: mol_type = other DNA
ccacctctatattgat

SEQ ID NO: 408 - DNA, 16 bp, synthetic construct
  misc_feature 1..16: note = Synthetic
  source 1..16: mol_type = other DNA
cacctctatattgata

SEQ ID NO: 409 - DNA, 16 bp, synthetic construct
  misc_feature 1..16: note = Synthetic
  source 1..16: mol_type = other DNA
acctctatattgataa

SEQ ID NO: 410 - DNA, 16 bp, synthetic construct
  misc_feature 1..16: note = Synthetic
  source 1..16: mol_type = other DNA
cctctatattgataag

SEQ ID NO: 411 - DNA, 16 bp, synthetic construct
  misc_feature 1..16: note = Synthetic
  source 1..16: mol_type = other DNA
ctctatattgataagt

SEQ ID NO: 412 - DNA, 16 bp, synthetic construct
  misc_feature 1..16: note = Synthetic
  source 1..16: mol_type = other DNA
tctatattgataagta

SEQ ID NO: 413 - DNA, 16 bp, synthetic construct
  misc_feature 1..16: note = Synthetic
  source 1..16: mol_type = other DNA
ctatattgataagtag

SEQ ID NO: 414 - DNA, 16 bp, synthetic construct
  misc_feature 1..16: note = Synthetic
  source 1..16: mol_type = other DNA
tatattgataagtagc

SEQ ID NO: 415 - DNA, 16 bp, synthetic construct
  misc_feature 1..16: note = Synthetic
  source 1..16: mol_type = other DNA
atattgataagtagcc

SEQ ID NO: 416 - DNA, 16 bp, synthetic construct
  misc_feature 1..16: note = Synthetic
  source 1..16: mol_type = other DNA
tattgataagtagcca

SEQ ID NO: 417 - DNA, 16 bp, synthetic construct
  misc_feature 1..16: note = Synthetic
  source 1..16: mol_type = other DNA
attgataagtagccaa

SEQ ID NO: 418 - DNA, 16 bp, synthetic construct
  misc_feature 1..16: note = Synthetic
  source 1..16: mol_type = other DNA
ttgataagtagccaat

SEQ ID NO: 419 - DNA, 16 bp, synthetic construct
  misc_feature 1..16: note = Synthetic
  source 1..16: mol_type = other DNA
tgataagtagccaatg

SEQ ID NO: 420 - DNA, 16 bp, synthetic construct
  misc_feature 1..16: note = Synthetic
  source 1..16: mol_type = other DNA
gataagtagccaatgg

SEQ ID NO: 421 - DNA, 16 bp, synthetic construct
  misc_feature 1..16: note = Synthetic
  source 1..16: mol_type = other DNA
ataagtagccaatggg

SEQ ID NO: 422 - DNA, 16 bp, synthetic construct
  misc_feature 1..16: note = Synthetic
  source 1..16: mol_type = other DNA
taagtagccaatggga

SEQ ID NO: 423 - DNA, 16 bp, synthetic construct
  misc_feature 1..16: note = Synthetic
  source 1..16: mol_type = other DNA
aagtagccaatgggag

SEQ ID NO: 424 - DNA, 16 bp, synthetic construct
  misc_feature 1..16: note = Synthetic
  source 1..16: mol_type = other DNA
agtagccaatgggagc

SEQ ID NO: 425 - DNA, 16 bp, synthetic construct
  misc_feature 1..16: note = Synthetic
  source 1..16: mol_type = other DNA
gtagccaatgggagcg

SEQ ID NO: 426 - DNA, 16 bp, synthetic construct
  misc_feature 1..16: note = Synthetic
  source 1..16: mol_type = other DNA
tagccaatgggagcgg

SEQ ID NO: 427 - DNA, 16 bp, synthetic construct
  misc_feature 1..16: note = Synthetic
  source 1..16: mol_type = other DNA
agccaatgggagcggg

SEQ ID NO: 428 - DNA, 16 bp, synthetic construct
  misc_feature 1..16: note = Synthetic
  source 1..16: mol_type = other DNA
gccaatgggagcgggt

SEQ ID NO: 429 - DNA, 16 bp, synthetic construct
  misc_feature 1..16: note = Synthetic
  source 1..16: mol_type = other DNA
ccaatgggagcgggta

SEQ ID NO: 430 - DNA, 16 bp, synthetic construct
  misc_feature 1..16: note = Synthetic
  source 1..16: mol_type = other DNA
caatgggagcgggtag

SEQ ID NO: 431 - DNA, 16 bp, synthetic construct
  misc_feature 1..16: note = Synthetic
  source 1..16: mol_type = other DNA
aatgggagcgggtagc

SEQ ID NO: 432 - DNA, 16 bp, synthetic construct
  misc_feature 1..16: note = Synthetic
  source 1..16: mol_type = other DNA
atgggagcgggtagcc

SEQ ID NO: 433 - DNA, 16 bp, synthetic construct
  misc_feature 1..16: note = Synthetic
  source 1..16: mol_type = other DNA
tgggagcgggtagccc

SEQ ID NO: 434 - DNA, 16 bp, synthetic construct
  misc_feature 1..16: note = Synthetic
  source 1..16: mol_type = other DNA
gggagcgggtagccct

SEQ ID NO: 435 - DNA, 16 bp, synthetic construct
  misc_feature 1..16: note = Synthetic
  source 1..16: mol_type = other DNA
ggagcgggtagccctg

SEQ ID NO: 436 - DNA, 16 bp, synthetic construct
  misc_feature 1..16: note = Synthetic
  source 1..16: mol_type = other DNA
gagcgggtagccctga

SEQ ID NO: 437 - DNA, 16 bp, synthetic construct
  misc_feature 1..16: note = Synthetic
  source 1..16: mol_type = other DNA
agcgggtagccctgat

SEQ ID NO: 438 - DNA, 16 bp, synthetic construct
  misc_feature 1..16: note = Synthetic
  source 1..16: mol_type = other DNA
gcgggtagccctgatc

SEQ ID NO: 439 - DNA, 16 bp, synthetic construct
  misc_feature 1..16: note = Synthetic
  source 1..16: mol_type = other DNA
cgggtagccctgatcc

SEQ ID NO: 440 - DNA, 16 bp, synthetic construct
  misc_feature 1..16: note = Synthetic
  source 1..16: mol_type = other DNA
gggtagccctgatccc

SEQ ID NO: 441 - DNA, 16 bp, synthetic construct
  misc_feature 1..16: note = Synthetic
  source 1..16: mol_type = other DNA
ggtagccctgatccct

SEQ ID NO: 442 - DNA, 16 bp, synthetic construct
  misc_feature 1..16: note = Synthetic
  source 1..16: mol_type = other DNA
gtagccctgatccctg

SEQ ID NO: 443 - DNA, 16 bp, synthetic construct
  misc_feature 1..16: note = Synthetic
  source 1..16: mol_type = other DNA
tagccctgatccctgg

SEQ ID NO: 444 - DNA, 16 bp, synthetic construct
  misc_feature 1..16: note = Synthetic
  source 1..16: mol_type = other DNA
agccctgatccctggc

SEQ ID NO: 445 - DNA, 16 bp, synthetic construct
  misc_feature 1..16: note = Synthetic
  source 1..16: mol_type = other DNA
gccctgatccctggcc

SEQ ID NO: 446 - DNA, 16 bp, synthetic construct
  misc_feature 1..16: note = Synthetic
  source 1..16: mol_type = other DNA
ccctgatccctggcca

SEQ ID NO: 447 - DNA, 16 bp, synthetic construct
  misc_feature 1..16: note = Synthetic
  source 1..16: mol_type = other DNA
cctgatccctggccaa

SEQ ID NO: 448 - DNA, 16 bp, synthetic construct
  misc_feature 1..16: note = Synthetic
  source 1..16: mol_type = other DNA
ctgatccctggccaat

SEQ ID NO: 449 - DNA, 16 bp, synthetic construct
  misc_feature 1..16: note = Synthetic
  source 1..16: mol_type = other DNA
tgatccctggccaatg

SEQ ID NO: 450 - DNA, 16 bp, synthetic construct
  misc_feature 1..16: note = Synthetic
  source 1..16: mol_type = other DNA
gatccctggccaatgg

SEQ ID NO: 451 - DNA, 16 bp, synthetic construct
  misc_feature 1..16: note = Synthetic
  source 1..16: mol_type = other DNA
atccctggccaatgga

SEQ ID NO: 452 - DNA, 16 bp, synthetic construct
  misc_feature 1..16: note = Synthetic
  source 1..16: mol_type = other DNA
tccctggccaatggaa

SEQ ID NO: 453 - DNA, 16 bp, synthetic construct
  misc_feature 1..16: note = Synthetic
  source 1..16: mol_type = other DNA
ccctggccaatggaaa

SEQ ID NO: 454 - DNA, 16 bp, synthetic construct
  misc_feature 1..16: note = Synthetic
  source 1..16: mol_type = other DNA
cctggccaatggaaac

SEQ ID NO: 455 - DNA, 16 bp, synthetic construct
  misc_feature 1..16: note = Synthetic
  source 1..16: mol_type = other DNA
ctggccaatggaaact

SEQ ID NO: 456 - DNA, 16 bp, synthetic construct
  misc_feature 1..16: note = Synthetic
  source 1..16: mol_type = other DNA
tggccaatggaaactg

SEQ ID NO: 457 - DNA, 16 bp, synthetic construct
  misc_feature 1..16: note = Synthetic
  source 1..16: mol_type = other DNA
ggccaatggaaactga

SEQ ID NO: 458 - DNA, 16 bp, synthetic construct
  misc_feature 1..16: note = Synthetic
  source 1..16: mol_type = other DNA
gccaatggaaactgag

SEQ ID NO: 459 - DNA, 16 bp, synthetic construct
  misc_feature 1..16: note = Synthetic
  source 1..16: mol_type = other DNA
ccaatggaaactgagg

SEQ ID NO: 460 - DNA, 16 bp, synthetic construct
  misc_feature 1..16: note = Synthetic
  source 1..16: mol_type = other DNA
caatggaaactgaggt

SEQ ID NO: 461 - DNA, 16 bp, synthetic construct
  misc_feature 1..16: note = Synthetic
  source 1..16: mol_type = other DNA
aatggaaactgaggta

SEQ ID NO: 462 - DNA, 16 bp, synthetic construct
  misc_feature 1..16: note = Synthetic
  source 1..16: mol_type = other DNA
atggaaactgaggtag

SEQ ID NO: 463 - DNA, 16 bp, synthetic construct
  misc_feature 1..16: note = Synthetic
  source 1..16: mol_type = other DNA
tggaaactgaggtagg

SEQ ID NO: 464 - DNA, 16 bp, synthetic construct
  misc_feature 1..16: note = Synthetic
  source 1..16: mol_type = other DNA
ggaaactgaggtaggc

SEQ ID NO: 465 - DNA, 16 bp, synthetic construct
  misc_feature 1..16: note = Synthetic
  source 1..16: mol_type = other DNA
gaaactgaggtaggcg

SEQ ID NO: 466 - DNA, 16 bp, synthetic construct
  misc_feature 1..16: note = Synthetic
  source 1..16: mol_type = other DNA
aaactgaggtaggcgg

SEQ ID NO: 467 - DNA, 16 bp, synthetic construct
  misc_feature 1..16: note = Synthetic
  source 1..16: mol_type = other DNA
aactgaggtaggcggg

SEQ ID NO: 468 - DNA, 16 bp, synthetic construct
  misc_feature 1..16: note = Synthetic
  source 1..16: mol_type = other DNA
actgaggtaggcgggt

SEQ ID NO: 469 - DNA, 16 bp, synthetic construct
  misc_feature 1..16: note = Synthetic
  source 1..16: mol_type = other DNA
ctgaggtaggcgggtc

SEQ ID NO: 470 - DNA, 16 bp, synthetic construct
  misc_feature 1..16: note = Synthetic
  source 1..16: mol_type = other DNA
tgaggtaggcgggtca

SEQ ID NO: 471 - DNA, 16 bp, synthetic construct
  misc_feature 1..16: note = Synthetic
  source 1..16: mol_type = other DNA
gaggtaggcgggtcat

SEQ ID NO: 472 - DNA, 16 bp, synthetic construct
  misc_feature 1..16: note = Synthetic
  source 1..16: mol_type = other DNA
aggtaggcgggtcatc

SEQ ID NO: 473 - DNA, 16 bp, synthetic construct
  misc_feature 1..16: note = Synthetic
  source 1..16: mol_type = other DNA
ggtaggcgggtcatcg

SEQ ID NO: 474 - DNA, 16 bp, synthetic construct
  misc_feature 1..16: note = Synthetic
  source 1..16: mol_type = other DNA
gtaggcgggtcatcgc

SEQ ID NO: 475 - DNA, 16 bp, synthetic construct
  misc_feature 1..16: note = Synthetic
  source 1..16: mol_type = other DNA
taggcgggtcatcgcg

SEQ ID NO: 476 - DNA, 16 bp, synthetic construct
  misc_feature 1..16: note = Synthetic
  source 1..16: mol_type = other DNA
aggcgggtcatcgcgc

SEQ ID NO: 477 - DNA, 16 bp, synthetic construct
  misc_feature 1..16: note = Synthetic
  source 1..16: mol_type = other DNA
ggcgggtcatcgcgct

SEQ ID NO: 478 - DNA, 16 bp, synthetic construct
  misc_feature 1..16: note = Synthetic
  source 1..16: mol_type = other DNA
gcgggtcatcgcgctg

SEQ ID NO: 479 - DNA, 16 bp, synthetic construct
  misc_feature 1..16: note = Synthetic
  source 1..16: mol_type = other DNA
cgggtcatcgcgctgg

SEQ ID NO: 480 - DNA, 16 bp, synthetic construct
  misc_feature 1..16: note = Synthetic
  source 1..16: mol_type = other DNA
gggtcatcgcgctggg

SEQ ID NO: 481 - DNA, 16 bp, synthetic construct
  misc_feature 1..16: note = Synthetic
  source 1..16: mol_type = other DNA
ggtcatcgcgctgggg

SEQ ID NO: 482 - DNA, 16 bp, synthetic construct
  misc_feature 1..16: note = Synthetic
  source 1..16: mol_type = other DNA
gtcatcgcgctggggt

SEQ ID NO: 483 - DNA, 16 bp, synthetic construct
  misc_feature 1..16: note = Synthetic
  source 1..16: mol_type = other DNA
tcatcgcgctggggtc

SEQ ID NO: 484 - DNA, 16 bp, synthetic construct
  misc_feature 1..16: note = Synthetic
  source 1..16: mol_type = other DNA
catcgcgctggggtct

SEQ ID NO: 485 - DNA, 16 bp, synthetic construct
  misc_feature 1..16: note = Synthetic
  source 1..16: mol_type = other DNA
atcgcgctggggtctg

SEQ ID NO: 486 - DNA, 16 bp, synthetic construct
  misc_feature 1..16: note = Synthetic
  source 1..16: mol_type = other DNA
tcgcgctggggtctgt

SEQ ID NO: 487 - DNA, 16 bp, synthetic construct
  misc_feature 1..16: note = Synthetic
  source 1..16: mol_type = other DNA
cgcgctggggtctgta

SEQ ID NO: 488 - DNA, 16 bp, synthetic construct
  misc_feature 1..16: note = Synthetic
  source 1..16: mol_type = other DNA
gcgctggggtctgtag

SEQ ID NO: 489 - DNA, 16 bp, synthetic construct
  misc_feature 1..16: note = Synthetic
  source 1..16: mol_type = other DNA
cgctggggtctgtagt

SEQ ID NO: 490 - DNA, 16 bp, synthetic construct
  misc_feature 1..16: note = Synthetic
  source 1..16: mol_type = other DNA
gctggggtctgtagtc

SEQ ID NO: 491 - DNA, 16 bp, synthetic construct
  misc_feature 1..16: note = Synthetic
  source 1..16: mol_type = other DNA
ctggggtctgtagtct

SEQ ID NO: 492 - DNA, 16 bp, synthetic construct
  misc_feature 1..16: note = Synthetic
  source 1..16: mol_type = other DNA
tggggtctgtagtctg

SEQ ID NO: 493 - DNA, 16 bp, synthetic construct
  misc_feature 1..16: note = Synthetic
  source 1..16: mol_type = other DNA
ggggtctgtagtctga

SEQ ID NO: 494 - DNA, 16 bp, synthetic construct
  misc_feature 1..16: note = Synthetic
  source 1..16: mol_type = other DNA
gggtctgtagtctgag

SEQ ID NO: 495 - DNA, 16 bp, synthetic construct
  misc_feature 1..16: note = Synthetic
  source 1..16: mol_type = other DNA
ggtctgtagtctgagc

SEQ ID NO: 496 - DNA, 16 bp, synthetic construct
  misc_feature 1..16: note = Synthetic
  source 1..16: mol_type = other DNA
gtctgtagtctgagcg

SEQ ID NO: 497 - DNA, 16 bp, synthetic construct
  misc_feature 1..16: note = Synthetic
  source 1..16: mol_type = other DNA
tctgtagtctgagcgc

SEQ ID NO: 498 - DNA, 16 bp, synthetic construct
  misc_feature 1..16: note = Synthetic
  source 1..16: mol_type = other DNA
ctgtagtctgagcgct

SEQ ID NO: 499 - DNA, 16 bp, synthetic construct
  misc_feature 1..16: note = Synthetic
  source 1..16: mol_type = other DNA
tgtagtctgagcgcta

SEQ ID NO: 500 - DNA, 16 bp, synthetic construct
  misc_feature 1..16: note = Synthetic
  source 1..16: mol_type = other DNA
gtagtctgagcgctac

SEQ ID NO: 501 - DNA, 16 bp, synthetic construct
  misc_feature 1..16: note = Synthetic
  source 1..16: mol_type = other DNA
tagtctgagcgctacc

SEQ ID NO: 502 - DNA, 16 bp, synthetic construct
  misc_feature 1..16: note = Synthetic
  source 1..16: mol_type = other DNA
agtctgagcgctaccc

SEQ ID NO: 503 - DNA, 16 bp, synthetic construct
  misc_feature 1..16: note = Synthetic
  source 1..16: mol_type = other DNA
gtctgagcgctacccg

SEQ ID NO: 504 - DNA, 16 bp, synthetic construct
  misc_feature 1..16: note = Synthetic
  source 1..16: mol_type = other DNA
tctgagcgctacccgg

SEQ ID NO: 505 - DNA, 16 bp, synthetic construct
  misc_feature 1..16: note = Synthetic
  source 1..16: mol_type = other DNA
ctgagcgctacccggt

SEQ ID NO: 506 - DNA, 16 bp, synthetic construct
  misc_feature 1..16: note = Synthetic
  source 1..16: mol_type = other DNA
tgagcgctacccggtt

SEQ ID NO: 507 - DNA, 16 bp, synthetic construct
  misc_feature 1..16: note = Synthetic
  source 1..16: mol_type = other DNA
gagcgctacccggttg

SEQ ID NO: 508 - DNA, 16 bp, synthetic construct
  misc_feature 1..16: note = Synthetic
  source 1..16: mol_type = other DNA
agcgctacccggttgc

SEQ ID NO: 509 - DNA, 16 bp, synthetic construct
  misc_feature 1..16: note = Synthetic
  source 1..16: mol_type = other DNA
gcgctacccggttgct

SEQ ID NO: 510 - DNA, 16 bp, synthetic construct
  misc_feature 1..16: note = Synthetic
  source 1..16: mol_type = other DNA
cgctacccggttgctg

SEQ ID NO: 511 - DNA, 16 bp, synthetic construct
  misc_feature 1..16: note = Synthetic
  source 1..16: mol_type = other DNA
gctacccggttgctgc

SEQ ID NO: 512 - DNA, 16 bp, synthetic construct
  misc_feature 1..16: note = Synthetic
  source 1..16: mol_type = other DNA
ctacccggttgctgct

SEQ ID NO: 513 - DNA, 16 bp, synthetic construct
  misc_feature 1..16: note = Synthetic
  source 1..16: mol_type = other DNA
tacccggttgctgctg

SEQ ID NO: 514 - DNA, 16 bp, synthetic construct
  misc_feature 1..16: note = Synthetic
  source 1..16: mol_type = other DNA
acccggttgctgctgc

SEQ ID NO: 515 - DNA, 16 bp, synthetic construct
  misc_feature 1..16: note = Synthetic
  source 1..16: mol_type = other DNA
cccggttgctgctgcc

SEQ ID NO: 516 - DNA, 16 bp, synthetic construct
  misc_feature 1..16: note = Synthetic
  source 1..16: mol_type = other DNA
ccggttgctgctgccc

SEQ ID NO: 517 - DNA, 16 bp, synthetic construct
  misc_feature 1..16: note = Synthetic
  source 1..16: mol_type = other DNA
cggttgctgctgccca

SEQ ID NO: 518 - DNA, 16 bp, synthetic construct
  misc_feature 1..16: note = Synthetic
  source 1..16: mol_type = other DNA
ggttgctgctgcccaa

SEQ ID NO: 519 - DNA, 16 bp, synthetic construct
  misc_feature 1..16: note = Synthetic
  source 1..16: mol_type = other DNA
gttgctgctgcccaag

SEQ ID NO: 520 - DNA, 16 bp, synthetic construct
  misc_feature 1..16: note = Synthetic
  source 1..16: mol_type = other DNA
ttgctgctgcccaagg

SEQ ID NO: 521 - DNA, 16 bp, synthetic construct
  misc_feature 1..16: note = Synthetic
  source 1..16: mol_type = other DNA
tgctgctgcccaagga

SEQ ID NO: 522 - DNA, 16 bp, synthetic construct
  misc_feature 1..16: note = Synthetic
  source 1..16: mol_type = other DNA
gctgctgcccaaggac

SEQ ID NO: 523 - DNA, 16 bp, synthetic construct
  misc_feature 1..16: note = Synthetic
  source 1..16: mol_type = other DNA
ctgctgcccaaggacc

SEQ ID NO: 524 - DNA, 16 bp, synthetic construct
  misc_feature 1..16: note = Synthetic
  source 1..16: mol_type = other DNA
tgctgcccaaggaccg

SEQ ID NO: 525 - DNA, 16 bp, synthetic construct
  misc_feature 1..16: note = Synthetic
  source 1..16: mol_type = other DNA
gctgcccaaggaccgc

SEQ ID NO: 526 - DNA, 16 bp, synthetic construct
  misc_feature 1..16: note = Synthetic
  source 1..16: mol_type = other DNA
ctgcccaaggaccgcg

SEQ ID NO: 527 - DNA, 16 bp, synthetic construct
  misc_feature 1..16: note = Synthetic
  source 1..16: mol_type = other DNA
tgcccaaggaccgcgg

SEQ ID NO: 528 - DNA, 16 bp, synthetic construct
  misc_feature 1..16: note = Synthetic
  source 1..16: mol_type = other DNA
gcccaaggaccgcgga

SEQ ID NO: 529 - DNA, 16 bp, synthetic construct
  misc_feature 1..16: note = Synthetic
  source 1..16: mol_type = other DNA
cccaaggaccgcggag

SEQ ID NO: 530 - DNA, 16 bp, synthetic construct
  misc_feature 1..16: note = Synthetic
  source 1..16: mol_type = other DNA
ccaaggaccgcggagt

SEQ ID NO: 531 - DNA, 16 bp, synthetic construct
  misc_feature 1..16: note = Synthetic
  source 1..16: mol_type = other DNA
caaggaccgcggagtc

SEQ ID NO: 532 - DNA, 16 bp, synthetic construct
  misc_feature 1..16: note = Synthetic
  source 1..16: mol_type = other DNA
aaggaccgcggagtcg

SEQ ID NO: 533 - DNA, 16 bp, synthetic construct
  misc_feature 1..16: note = Synthetic
  source 1..16: mol_type = other DNA
aggaccgcggagtcgg

SEQ ID NO: 534 - DNA, 16 bp, synthetic construct
  misc_feature 1..16: note = Synthetic
  source 1..16: mol_type = other DNA
ggaccgcggagtcgga

SEQ ID NO: 535 - DNA, 16 bp, synthetic construct
  misc_feature 1..16: note = Synthetic
  source 1..16: mol_type = other DNA
gaccgcggagtcggac

SEQ ID NO: 536 - DNA, 16 bp, synthetic construct
  misc_feature 1..16: note = Synthetic
  source 1..16: mol_type = other DNA
accgcggagtcggacg

SEQ ID NO: 537 - DNA, 16 bp, synthetic construct
  misc_feature 1..16: note = Synthetic
  source 1..16: mol_type = other DNA
ccgcggagtcggacgc

SEQ ID NO: 538 - DNA, 16 bp, synthetic construct
  misc_feature 1..16: note = Synthetic
  source 1..16: mol_type = other DNA
cgcggagtcggacgca

SEQ ID NO: 539 - DNA, 16 bp, synthetic construct
  misc_feature 1..16: note = Synthetic
  source 1..16: mol_type = other DNA
gcggagtcggacgcag

SEQ ID NO: 540 - DNA, 16 bp, synthetic construct
  misc_feature 1..16: note = Synthetic
  source 1..16: mol_type = other DNA
cggagtcggacgcagg

SEQ ID NO: 541 - DNA, 16 bp, synthetic construct
  misc_feature 1..16: note = Synthetic
  source 1..16: mol_type = other DNA
ggagtcggacgcaggc

SEQ ID NO: 542 - DNA, 16 bp, synthetic construct
  misc_feature 1..16: note = Synthetic
  source 1..16: mol_type = other DNA
gagtcggacgcaggca

SEQ ID NO: 543 - DNA, 16 bp, synthetic construct
  misc_feature 1..16: note = Synthetic
  source 1..16: mol_type = other DNA
agtcggacgcaggcag

SEQ ID NO: 544 - DNA, 16 bp, synthetic construct
  misc_feature 1..16: note = Synthetic
  source 1..16: mol_type = other DNA
gtcggacgcaggcaga

SEQ ID NO: 545 - DNA, 16 bp, synthetic construct
  misc_feature 1..16: note = Synthetic
  source 1..16: mol_type = other DNA
tcggacgcaggcagac

SEQ ID NO: 546 - DNA, 16 bp, synthetic construct
  misc_feature 1..16: note = Synthetic
  source 1..16: mol_type = other DNA
cggacgcaggcagacc

SEQ ID NO: 547 - DNA, 18 bp, synthetic construct
  misc_feature 1..18: note = Synthetic
  source 1..18: mol_type = other DNA
taagtagccaatgggagc

SEQ ID NO: 548 - DNA, 18 bp, synthetic construct
  misc_feature 1..18: note = Synthetic
  source 1..18: mol_type = other DNA
aagtagccaatgggagcg

SEQ ID NO: 549 - DNA, 18 bp, synthetic construct
  misc_feature 1..18: note = Synthetic
  source 1..18: mol_type = other DNA
agtagccaatgggagcgg

SEQ ID NO: 550 - DNA, 18 bp, synthetic construct
  misc_feature 1..18: note = Synthetic
  source 1..18: mol_type = other DNA
gtagccaatgggagcggg

SEQ ID NO: 551 - DNA, 18 bp, synthetic construct
  misc_feature 1..18: note = Synthetic
  source 1..18: mol_type = other DNA
tagccaatgggagcgggt

SEQ ID NO: 552 - DNA, 18 bp, synthetic construct
  misc_feature 1..18: note = Synthetic
  source 1..18: mol_type = other DNA
agccaatgggagcgggta

SEQ ID NO: 553 - DNA, 18 bp, synthetic construct
  misc_feature 1..18: note = Synthetic
  source 1..18: mol_type = other DNA
gccaatgggagcgggtag

SEQ ID NO: 554 - DNA, 18 bp, synthetic construct
  misc_feature 1..18: note = Synthetic
  source 1..18: mol_type = other DNA
ccaatgggagcgggtagc

SEQ ID NO: 555 - DNA, 18 bp, synthetic construct
  misc_feature 1..18: note = Synthetic
  source 1..18: mol_type = other DNA
caatgggagcgggtagcc

SEQ ID NO: 556 - DNA, 18 bp, synthetic construct
  misc_feature 1..18: note = Synthetic
  source 1..18: mol_type = other DNA
aatgggagcgggtagccc

SEQ ID NO: 557 - DNA, 18 bp, synthetic construct
  misc_feature 1..18: note = Synthetic
  source 1..18: mol_type = other DNA
atgggagcgggtagccct

SEQ ID NO: 558 - DNA, 18 bp, synthetic construct
  misc_feature 1..18: note = Synthetic
  source 1..18: mol_type = other DNA
tgggagcgggtagccctg

SEQ ID NO: 559 - DNA, 18 bp, synthetic construct
  misc_feature 1..18: note = Synthetic
  source 1..18: mol_type = other DNA
gggagcgggtagccctga

SEQ ID NO: 560 - DNA, 18 bp, synthetic construct
  misc_feature 1..18: note = Synthetic
  source 1..18: mol_type = other DNA
ggagcgggtagccctgat

SEQ ID NO: 561 - DNA, 18 bp, synthetic construct
  misc_feature 1..18: note = Synthetic
  source 1..18: mol_type = other DNA
gagcgggtagccctgatc

SEQ ID NO: 562 - DNA, 18 bp, synthetic construct
  misc_feature 1..18: note = Synthetic
  source 1..18: mol_type = other DNA
agcgggtagccctgatcc

SEQ ID NO: 563 - DNA, 18 bp, synthetic construct
  misc_feature 1..18: note = Synthetic
  source 1..18: mol_type = other DNA
gcgggtagccctgatccc

SEQ ID NO: 564 - DNA, 18 bp, synthetic construct
  misc_feature 1..18: note = Synthetic
  source 1..18: mol_type = other DNA
cgggtagccctgatccct

SEQ ID NO: 565 - DNA, 18 bp, synthetic construct
  misc_feature 1..18: note = Synthetic
  source 1..18: mol_type = other DNA
gggtagccctgatccctg

SEQ ID NO: 566 - DNA, 18 bp, synthetic construct
  misc_feature 1..18: note = Synthetic
  source 1..18: mol_type = other DNA
ggtagccctgatccctgg

SEQ ID NO: 567 - DNA, 18 bp, synthetic construct
  misc_feature 1..18: note = Synthetic
  source 1..18: mol_type = other DNA
gtagccctgatccctggc

SEQ ID NO: 568 - DNA, 18 bp, synthetic construct
  misc_feature 1..18: note = Synthetic
  source 1..18: mol_type = other DNA
tagccctgatccctggcc

SEQ ID NO: 569 - DNA, 18 bp, synthetic construct
  misc_feature 1..18: note = Synthetic
  source 1..18: mol_type = other DNA
agccctgatccctggcca

SEQ ID NO: 570 - DNA, 18 bp, synthetic construct
  misc_feature 1..18: note = Synthetic
  source 1..18: mol_type = other DNA
gccctgatccctggccaa

SEQ ID NO: 571 - DNA, 18 bp, synthetic construct
  misc_feature 1..18: note = Synthetic
  source 1..18: mol_type = other DNA
ccctgatccctggccaat

SEQ ID NO: 572 - DNA, 18 bp, synthetic construct
  misc_feature 1..18: note = Synthetic
  source 1..18: mol_type = other DNA
cctgatccctggccaatg

SEQ ID NO: 573 - DNA, 18 bp, synthetic construct
  misc_feature 1..18: note = Synthetic
  source 1..18: mol_type = other DNA
ctgatccctggccaatgg

SEQ ID NO: 574 - DNA, 18 bp, synthetic construct
  misc_feature 1..18: note = Synthetic
  source 1..18: mol_type = other DNA
tgatccctggccaatgga

SEQ ID NO: 575 - DNA, 18 bp, synthetic construct
  misc_feature 1..18: note = Synthetic
  source 1..18: mol_type = other DNA
gatccctggccaatggaa

SEQ ID NO: 576 - DNA, 18 bp, synthetic construct
  misc_feature 1..18: note = Synthetic
  source 1..18: mol_type = other DNA
atccctggccaatggaaa

SEQ ID NO: 577 - DNA, 18 bp, synthetic construct
  misc_feature 1..18: note = Synthetic
  source 1..18: mol_type = other DNA
tccctggccaatggaaac

SEQ ID NO: 578 - DNA, 18 bp, synthetic construct
  misc_feature 1..18: note = Synthetic
  source 1..18: mol_type = other DNA
ccctggccaatggaaact

SEQ ID NO: 579 - DNA, 18 bp, synthetic construct
  misc_feature 1..18: note = Synthetic
  source 1..18: mol_type = other DNA
cctggccaatggaaactg

SEQ ID NO: 580 - DNA, 18 bp, synthetic construct
  misc_feature 1..18: note = Synthetic
  source 1..18: mol_type = other DNA
ctggccaatggaaactga

SEQ ID NO: 581 - DNA, 18 bp, synthetic construct
  misc_feature 1..18: note = Synthetic
  source 1..18: mol_type = other DNA
tggccaatggaaactgag

SEQ ID NO: 582 - DNA, 18 bp, synthetic construct
  misc_feature 1..18: note = Synthetic
  source 1..18: mol_type = other DNA
ggccaatggaaactgagg

SEQ ID NO: 583 - DNA, 18 bp, synthetic construct
  misc_feature 1..18: note = Synthetic
  source 1..18: mol_type = other DNA
gccaatggaaactgaggt

SEQ ID NO: 584 - DNA, 18 bp, synthetic construct
  misc_feature 1..18: note = Synthetic
  source 1..18: mol_type = other DNA
ccaatggaaactgaggta

SEQ ID NO: 585 - DNA, 18 bp, synthetic construct
  misc_feature 1..18: note = Synthetic
  source 1..18: mol_type = other DNA
caatggaaactgaggtag

SEQ ID NO: 586 - DNA, 18 bp, synthetic construct
  misc_feature 1..18: note = Synthetic
  source 1..18: mol_type = other DNA
aatggaaactgaggtagg

SEQ ID NO: 587 - DNA, 18 bp, synthetic construct
  misc_feature 1..18: note = Synthetic
  source 1..18: mol_type = other DNA
agtactgaagactctgca

SEQ ID NO: 588 - DNA, 18 bp, synthetic construct
  misc_feature 1..18: note = Synthetic
  source 1..18: mol_type = other DNA
actgaagactctgcagcc

SEQ ID NO: 589 - DNA, 18 bp, synthetic construct
  misc_feature 1..18: note = Synthetic
  source 1..18: mol_type = other DNA
gaagactctgcagccctc

SEQ ID NO: 590 - DNA, 18 bp, synthetic construct
  misc_feature 1..18: note = Synthetic
  source 1..18: mol_type = other DNA
gactctgcagccctcggg

SEQ ID NO: 591 - DNA, 18 bp, synthetic construct
  misc_feature 1..18: note = Synthetic
  source 1..18: mol_type = other DNA
tctgcagccctcgggacc

SEQ ID NO: 592 - DNA, 18 bp, synthetic construct
  misc_feature 1..18: note = Synthetic
  source 1..18: mol_type = other DNA
gcagccctcgggacccca

SEQ ID NO: 593 - DNA, 18 bp, synthetic construct
  misc_feature 1..18: note = Synthetic
  source 1..18: mol_type = other DNA
gccctcgggaccccactc

SEQ ID NO: 594 - DNA, 18 bp, synthetic construct
  misc_feature 1..18: note = Synthetic
  source 1..18: mol_type = other DNA
ctcgggaccccactcgga

SEQ ID NO: 595 - DNA, 18 bp, synthetic construct
  misc_feature 1..18: note = Synthetic
  source 1..18: mol_type = other DNA
gggaccccactcggaggg

SEQ ID NO: 596 - DNA, 18 bp, synthetic construct
  misc_feature 1..18: note = Synthetic
  source 1..18: mol_type = other DNA
accccactcggagggtgc

SEQ ID NO: 597 - DNA, 18 bp, synthetic construct
  misc_feature 1..18: note = Synthetic
  source 1..18: mol_type = other DNA
ccactcggagggtgccct

SEQ ID NO: 598 - DNA, 18 bp, synthetic construct
  misc_feature 1..18: note = Synthetic
  source 1..18: mol_type = other DNA
ctcggagggtgccctctg

SEQ ID NO: 599 - DNA, 18 bp, synthetic construct
  misc_feature 1..18: note = Synthetic
  source 1..18: mol_type = other DNA
ggagggtgccctctgctc

SEQ ID NO: 600 - DNA, 18 bp, synthetic construct
  misc_feature 1..18: note = Synthetic
  source 1..18: mol_type = other DNA
gggtgccctctgctcagg

SEQ ID NO: 601 - DNA, 18 bp, synthetic construct
  misc_feature 1..18: note = Synthetic
  source 1..18: mol_type = other DNA
tgccctctgctcaggcct

SEQ ID NO: 602 - DNA, 18 bp, synthetic construct
  misc_feature 1..18: note = Synthetic
  source 1..18: mol_type = other DNA
cctctgctcaggcctccc

SEQ ID NO: 603 - DNA, 18 bp, synthetic construct
  misc_feature 1..18: note = Synthetic
  source 1..18: mol_type = other DNA
ctgctcaggcctccctag

SEQ ID NO: 604 - DNA, 18 bp, synthetic construct
  misc_feature 1..18: note = Synthetic
  source 1..18: mol_type = other DNA
ctcaggcctccctagcac

SEQ ID NO: 605 - DNA, 18 bp, synthetic construct
  misc_feature 1..18: note = Synthetic
  source 1..18: mol_type = other DNA
aggcctccctagcacctc

SEQ ID NO: 606 - DNA, 18 bp, synthetic construct
  misc_feature 1..18: note = Synthetic
  source 1..18: mol_type = other DNA
cctccctagcacctcccc

SEQ ID NO: 607 - DNA, 18 bp, synthetic construct
  misc_feature 1..18: note = Synthetic
  source 1..18: mol_type = other DNA
ccctagcacctcccccta

SEQ ID NO: 608 - DNA, 18 bp, synthetic construct
  misc_feature 1..18: note = Synthetic
  source 1..18: mol_type = other DNA
tagcacctccccctaacc

SEQ ID NO: 609 - DNA, 18 bp, synthetic construct
  misc_feature 1..18: note = Synthetic
  source 1..18: mol_type = other DNA
cacctccccctaaccaaa

SEQ ID NO: 610 - DNA, 18 bp, synthetic construct
  misc_feature 1..18: note = Synthetic
  source 1..18: mol_type = other DNA
ctccccctaaccaaattc

SEQ ID NO: 611 - DNA, 18 bp, synthetic construct
  misc_feature 1..18: note = Synthetic
  source 1..18: mol_type = other DNA
cccctaaccaaattctcc

SEQ ID NO: 612 - DNA, 18 bp, synthetic construct
  misc_feature 1..18: note = Synthetic
  source 1..18: mol_type = other DNA
ctaaccaaattctccctg

SEQ ID NO: 613 - DNA, 18 bp, synthetic construct
  misc_feature 1..18: note = Synthetic
  source 1..18: mol_type = other DNA
accaaattctccctggac

SEQ ID NO: 614 - DNA, 18 bp, synthetic construct
  misc_feature 1..18: note = Synthetic
  source 1..18: mol_type = other DNA
aaattctccctggacccc

SEQ ID NO: 615 - DNA, 18 bp, synthetic construct
  misc_feature 1..18: note = Synthetic
  source 1..18: mol_type = other DNA
ttctccctggaccccatt

SEQ ID NO: 616 - DNA, 18 bp, synthetic construct
  misc_feature 1..18: note = Synthetic
  source 1..18: mol_type = other DNA
tccctggaccccattctg

SEQ ID NO: 617 - DNA, 18 bp, synthetic construct
  misc_feature 1..18: note = Synthetic
  source 1..18: mol_type = other DNA
ctggaccccattctgagc

SEQ ID NO: 618 - DNA, 18 bp, synthetic construct
  misc_feature 1..18: note = Synthetic
  source 1..18: mol_type = other DNA
gaccccattctgagctcc

SEQ ID NO: 619 - DNA, 18 bp, synthetic construct
  misc_feature 1..18: note = Synthetic
  source 1..18: mol_type = other DNA
cccattctgagctcccca

SEQ ID NO: 620 - DNA, 18 bp, synthetic construct
  misc_feature 1..18: note = Synthetic
  source 1..18: mol_type = other DNA
attctgagctccccatca

SEQ ID NO: 621 - DNA, 18 bp, synthetic construct
  misc_feature 1..18: note = Synthetic
  source 1..18: mol_type = other DNA
ctgagctccccatcacca

SEQ ID NO: 622 - DNA, 18 bp, synthetic construct
  misc_feature 1..18: note = Synthetic
  source 1..18: mol_type = other DNA
agctccccatcaccatgg

SEQ ID NO: 623 - DNA, 18 bp, synthetic construct
  misc_feature 1..18: note = Synthetic
  source 1..18: mol_type = other DNA
tccccatcaccatgggag

SEQ ID NO: 624 - DNA, 18 bp, synthetic construct
  misc_feature 1..18: note = Synthetic
  source 1..18: mol_type = other DNA
ccatcaccatgggaggtg

SEQ ID NO: 625 - DNA, 18 bp, synthetic construct
  misc_feature 1..18: note = Synthetic
  source 1..18: mol_type = other DNA
tcaccatgggaggtgggg

SEQ ID NO: 626 - DNA, 18 bp, synthetic construct
  misc_feature 1..18: note = Synthetic
  source 1..18: mol_type = other DNA
ccatgggaggtggggcct

SEQ ID NO: 627 - DNA, 18 bp, synthetic construct
  misc_feature 1..18: note = Synthetic
  source 1..18: mol_type = other DNA
tgggaggtggggcctcaa

SEQ ID NO: 628 - DNA, 18 bp, synthetic construct
  misc_feature 1..18: note = Synthetic
  source 1..18: mol_type = other DNA
gaggtggggcctcaatct

SEQ ID NO: 629 - DNA, 18 bp, synthetic construct
  misc_feature 1..18: note = Synthetic
  source 1..18: mol_type = other DNA
gtggggcctcaatctaag

SEQ ID NO: 630 - DNA, 18 bp, synthetic construct
  misc_feature 1..18: note = Synthetic
  source 1..18: mol_type = other DNA
gggcctcaatctaaggcc

SEQ ID NO: 631 - DNA, 18 bp, synthetic construct
  misc_feature 1..18: note = Synthetic
  source 1..18: mol_type = other DNA
cctcaatctaaggccttc

SEQ ID NO: 632 - DNA, 18 bp, synthetic construct
  misc_feature 1..18: note = Synthetic
  source 1..18: mol_type = other DNA
caatctaaggccttccct

SEQ ID NO: 633 - DNA, 18 bp, synthetic construct
  misc_feature 1..18: note = Synthetic
  source 1..18: mol_type = other DNA
tctaaggccttccctgtc

SEQ ID NO: 634 - DNA, 18 bp, synthetic construct
  misc_feature 1..18: note = Synthetic
  source 1..18: mol_type = other DNA
aaggccttccctgtcaga

SEQ ID NO: 635 - DNA, 18 bp, synthetic construct
  misc_feature 1..18: note = Synthetic
  source 1..18: mol_type = other DNA
gccttccctgtcagaagg

SEQ ID NO: 636 - DNA, 18 bp, synthetic construct
  misc_feature 1..18: note = Synthetic
  source 1..18: mol_type = other DNA
ttccctgtcagaaggggg

SEQ ID NO: 637 - DNA, 18 bp, synthetic construct
  misc_feature 1..18: note = Synthetic
  source 1..18: mol_type = other DNA
cctgtcagaagggggttg

SEQ ID NO: 638 - DNA, 18 bp, synthetic construct
  misc_feature 1..18: note = Synthetic
  source 1..18: mol_type = other DNA
gtcagaagggggttgtgg

SEQ ID NO: 639 - DNA, 18 bp, synthetic construct
  misc_feature 1..18: note = Synthetic
  source 1..18: mol_type = other DNA
agaagggggttgtggcaa

SEQ ID NO: 640 - DNA, 18 bp, synthetic construct
  misc_feature 1..18: note = Synthetic
  source 1..18: mol_type = other DNA
agggggttgtggcaaaag

SEQ ID NO: 641 - DNA, 18 bp, synthetic construct
  misc_feature 1..18: note = Synthetic
  source 1..18: mol_type = other DNA
gggttgtggcaaaagcca

SEQ ID NO: 642 - DNA, 18 bp, synthetic construct
  misc_feature 1..18: note = Synthetic
  source 1..18: mol_type = other DNA
ttgtggcaaaagccacat

SEQ ID NO: 643 - DNA, 18 bp, synthetic construct
  misc_feature 1..18: note = Synthetic
  source 1..18: mol_type = other DNA
tggcaaaagccacattac

SEQ ID NO: 644 - DNA, 18 bp, synthetic construct
  misc_feature 1..18: note = Synthetic
  source 1..18: mol_type = other DNA
caaaagccacattacaag

SEQ ID NO: 645 - DNA, 18 bp, synthetic construct
  misc_feature 1..18: note = Synthetic
  source 1..18: mol_type = other DNA
aagccacattacaagctg

SEQ ID NO: 646 - DNA, 18 bp, synthetic construct
  misc_feature 1..18: note = Synthetic
  source 1..18: mol_type = other DNA
ccacattacaagctgcca

SEQ ID NO: 647 - DNA, 18 bp, synthetic construct
  misc_feature 1..18: note = Synthetic
  source 1..18: mol_type = other DNA
cattacaagctgccatcc

SEQ ID NO: 648 - DNA, 18 bp, synthetic construct
  misc_feature 1..18: note = Synthetic
  source 1..18: mol_type = other DNA
tacaagctgccatcccct

SEQ ID NO: 649 - DNA, 18 bp, synthetic construct
  misc_feature 1..18: note = Synthetic
  source 1..18: mol_type = other DNA
aagctgccatcccctccc

SEQ ID NO: 650 - DNA, 18 bp, synthetic construct
  misc_feature 1..18: note = Synthetic
  source 1..18: mol_type = other DNA
ctgccatcccctccccgt

SEQ ID NO: 651 - DNA, 18 bp, synthetic construct
  misc_feature 1..18: note = Synthetic
  source 1..18: mol_type = other DNA
ccatcccctccccgtttc

SEQ ID NO: 652 - DNA, 18 bp, synthetic construct
  misc_feature 1..18: note = Synthetic
  source 1..18: mol_type = other DNA
tcccctccccgtttcagt

SEQ ID NO: 653 - DNA, 18 bp, synthetic construct
  misc_feature 1..18: note = Synthetic
  source 1..18: mol_type = other DNA
cctccccgtttcagtgga

SEQ ID NO: 654 - DNA, 18 bp, synthetic construct
  misc_feature 1..18: note = Synthetic
  source 1..18: mol_type = other DNA
ccccgtttcagtggaccc

SEQ ID NO: 655 - DNA, 18 bp, synthetic construct
  misc_feature 1..18: note = Synthetic
  source 1..18: mol_type = other DNA
cgtttcagtggaccctgt

SEQ ID NO: 656 - DNA, 18 bp, synthetic construct
  misc_feature 1..18: note = Synthetic
  source 1..18: mol_type = other DNA
ttcagtggaccctgtggc

SEQ ID NO: 657 - DNA, 18 bp, synthetic construct
  misc_feature 1..18: note = Synthetic
  source 1..18: mol_type = other DNA
agtggaccctgtggccag

SEQ ID NO: 658 - DNA, 18 bp, synthetic construct
  misc_feature 1..18: note = Synthetic
  source 1..18: mol_type = other DNA
ggaccctgtggccaggtg

SEQ ID NO: 659 - DNA, 18 bp, synthetic construct
  misc_feature 1..18: note = Synthetic
  source 1..18: mol_type = other DNA
ccctgtggccaggtgctt

SEQ ID NO: 660 - DNA, 18 bp, synthetic construct
  misc_feature 1..18: note = Synthetic
  source 1..18: mol_type = other DNA
tgtggccaggtgcttttc

SEQ ID NO: 661 - DNA, 18 bp, synthetic construct
  misc_feature 1..18: note = Synthetic
  source 1..18: mol_type = other DNA
ggccaggtgcttttccct

SEQ ID NO: 662 - DNA, 18 bp, synthetic construct
  misc_feature 1..18: note = Synthetic
  source 1..18: mol_type = other DNA
caggtgcttttccctatc

SEQ ID NO: 663 - DNA, 18 bp, synthetic construct
  misc_feature 1..18: note = Synthetic
  source 1..18: mol_type = other DNA
gtgcttttccctatccac

SEQ ID NO: 664 - DNA, 18 bp, synthetic construct
  misc_feature 1..18: note = Synthetic
  source 1..18: mol_type = other DNA
cttttccctatccacagg

SEQ ID NO: 665 - DNA, 18 bp, synthetic construct
  misc_feature 1..18: note = Synthetic
  source 1..18: mol_type = other DNA
ttccctatccacaggggt

SEQ ID NO: 666 - DNA, 18 bp, synthetic construct
  misc_feature 1..18: note = Synthetic
  source 1..18: mol_type = other DNA
cctatccacaggggtgtt

SEQ ID NO: 667 - DNA, 18 bp, synthetic construct
  misc_feature 1..18: note = Synthetic
  source 1..18: mol_type = other DNA
atccacaggggtgtttgt

SEQ ID NO: 668 - DNA, 18 bp, synthetic construct
  misc_feature 1..18: note = Synthetic
  source 1..18: mol_type = other DNA
cacaggggtgtttgtgtg

SEQ ID NO: 669 - DNA, 18 bp, synthetic construct
  misc_feature 1..18: note = Synthetic
  source 1..18: mol_type = other DNA
aggggtgtttgtgtgtgt

SEQ ID NO: 670 - DNA, 18 bp, synthetic construct
  misc_feature 1..18: note = Synthetic
  source 1..18: mol_type = other DNA
ggtgtttgtgtgtgtgcg

SEQ ID NO: 671 - DNA, 18 bp, synthetic construct
  misc_feature 1..18: note = Synthetic
  source 1..18: mol_type = other DNA
gtttgtgtgtgtgcgcgt

SEQ ID NO: 672 - DNA, 18 bp, synthetic construct
  misc_feature 1..18: note = Synthetic
  source 1..18: mol_type = other DNA
tgtgtgtgtgcgcgtgtg

SEQ ID NO: 673 - DNA, 18 bp, synthetic construct
  misc_feature 1..18: note = Synthetic
  source 1..18: mol_type = other DNA
gtgtgtgcgcgtgtgcgt

SEQ ID NO: 674 - DNA, 18 bp, synthetic construct
  misc_feature 1..18: note = Synthetic
  source 1..18: mol_type = other DNA
tgtgcgcgtgtgcgtttc

SEQ ID NO: 675 - DNA, 18 bp, synthetic construct
  misc_feature 1..18: note = Synthetic
  source 1..18: mol_type = other DNA
gcgcgtgtgcgtttcaat

SEQ ID NO: 676 - DNA, 18 bp, synthetic construct
  misc_feature 1..18: note = Synthetic
  source 1..18: mol_type = other DNA
cgtgtgcgtttcaataaa

SEQ ID NO: 677 - DNA, 18 bp, synthetic construct
  misc_feature 1..18: note = Synthetic
  source 1..18: mol_type = other DNA
gtgcgtttcaataaagtt

SEQ ID NO: 678 - DNA, 18 bp, synthetic construct
  misc_feature 1..18: note = Synthetic
  source 1..18: mol_type = other DNA
cgtttcaataaagtttgt

SEQ ID NO: 679 - DNA, 18 bp, synthetic construct
  misc_feature 1..18: note = Synthetic
  source 1..18: mol_type = other DNA
ttcaataaagtttgtaca

SEQ ID NO: 680 - DNA, 18 bp, synthetic construct
  misc_feature 1..18: note = Synthetic
  source 1..18: mol_type = other DNA
aataaagtttgtacactt

SEQ ID NO: 681 - DNA, 18 bp, synthetic construct
  misc_feature 1..18: note = Synthetic
  source 1..18: mol_type = other DNA
aaagtttgtacactttct

SEQ ID NO: 682 - DNA, 18 bp, synthetic construct
  misc_feature 1..18: note = Synthetic
  source 1..18: mol_type = other DNA
gtttgtacactttcttaa

SEQ ID NO: 683 - DNA, 23 bp, synthetic construct
  misc_feature 1..23: note = Synthetic
  source 1..23: mol_type = other DNA
tggccaatggaaactgaggtagg

SEQ ID NO: 684 - DNA, 33 bp, synthetic construct
  misc_feature 1..33: note = Synthetic
  source 1..33: mol_type = other DNA
ccctagcacctccccctaaccaaattctccctg

SEQ ID NO: 685 - DNA, 21 bp, synthetic construct
  misc_feature 1..21: note = Synthetic
  source 1..21: mol_type = other DNA
cccattctgagctccccatca

SEQ ID NO: 686 - DNA, 21 bp, synthetic construct
  misc_feature 1..21: note = Synthetic
  source 1..21: mol_type = other DNA
agggggttgtggcaaaagcca

SEQ ID NO: 687 - DNA, 21 bp, synthetic construct
  misc_feature 1..21: note = Synthetic
  source 1..21: mol_type = other DNA
ccatcccctccccgtttcagt

SEQ ID NO: 688 - DNA, 18 bp, synthetic construct
  misc_feature 1..18: note = Synthetic
  source 1..18: mol_type = other DNA
atccacaggggtgtttgt

SEQ ID NO: 689 - RNA, 57 nt, Homo sapiens
  modified_base 1: mod_base = OTHER; note = thymine
  modified_base 5: mod_base = OTHER; note = thymine
  modified_base 12: mod_base = OTHER; note = thymine
  modified_base 22: mod_base = OTHER; note = thymine
  modified_base 28: mod_base = OTHER; note = thymine
  modified_base 31: mod_base = OTHER; note = thymine
  modified_base 35: mod_base = OTHER; note = thymine
  modified_base 42: mod_base = OTHER; note = thymine
  modified_base 49: mod_base = OTHER; note = thymine
  modified_base 54: mod_base = OTHER; note = thymine
  source 1..57: mol_type = mRNA
taagtagccaatgggagcgggtagccctgatccctggccaatggaaactgaggtagg

SEQ ID NO: 690 - RNA, 219 nt, Homo sapiens
  modified_base 25: mod_base = OTHER; note = thymine
  modified_base 28..30: mod_base = OTHER; note = thymine
  modified_base 34: mod_base = OTHER; note = thymine
  modified_base 52..53: mod_base = OTHER; note = thymine
  modified_base 60: mod_base = OTHER; note = thymine
  modified_base 70: mod_base = OTHER; note = thymine
  modified_base 72: mod_base = OTHER; note = thymine
  modified_base 74: mod_base = OTHER; note = thymine
  modified_base 76..77: mod_base = OTHER; note = thymine
  modified_base 80: mod_base = OTHER; note = thymine
  modified_base 84: mod_base = OTHER; note = thymine
  modified_base 91: mod_base = OTHER; note = thymine
  modified_base 101: mod_base = OTHER; note = thymine
  modified_base 107: mod_base = OTHER; note = thymine
  modified_base 110: mod_base = OTHER; note = thymine
  modified_base 114: mod_base = OTHER; note = thymine
  modified_base 121: mod_base = OTHER; note = thymine
  modified_base 128: mod_base = OTHER; note = thymine
  modified_base 133: mod_base = OTHER; note = thymine
  modified_base 141: mod_base = OTHER; note = thymine
  modified_base 144: mod_base = OTHER; note = thymine
  modified_base 150: mod_base = OTHER; note = thymine
  modified_base 155: mod_base = OTHER; note = thymine
  modified_base 157: mod_base = OTHER; note = thymine
  modified_base 159: mod_base = OTHER; note = thymine
  modified_base 162: mod_base = OTHER; note = thymine
  modified_base 164: mod_base = OTHER; note = thymine
  modified_base 171: mod_base = OTHER; note = thymine
  modified_base 178..179: mod_base = OTHER; note = thymine
  modified_base 182: mod_base = OTHER; note = thymine
  modified_base 185: mod_base = OTHER; note = thymine
  modified_base 203: mod_base = OTHER; note = thymine
  source 1..219: mol_type = mRNA
ggcgagaggaagcagggaggagagtgatttgagtagaaaagaaacacagcattccaggctggccccacctctatattgataagtagccaatgggagcgggtagccctgatccctggccaatggaaactgaggtaggcgggtcatcgcgctggggtctgtagtctgagcgctacccggttgctgctgcccaaggaccgcggagtcggacgcaggcagacc

SEQ ID NO: 691 - DNA, 128 bp, synthetic construct
  misc_feature 1..128: note = Synthetic
  source 1..128: mol_type = other DNA
atggaaactgaggtaggcgggtcatcgcgctggggtctgtagtctgagcgctacccggttgctgctgcccaaggaccgcggagtcggacgcaggcagaccatggcttccaaggtgtacgaccccgagc

SEQ ID NO: 692 - DNA, 149 bp, synthetic construct
  misc_feature 1..149: note = Synthetic
  source 1..149: mol_type = other DNA
tggccagggatcagggctacccgctcccattggctacttatcaatatagaggtggggccagcctggaatgctgtgtttcttttctactcaaatcactctcctccctgcttcctctcgccggctagcctatagtgagtcgtattaagtac

SEQ ID NO: 693 - DNA, 18 bp, synthetic construct
  misc_feature 1..18: note = Synthetic
  source 1..18: mol_type = other DNA
tttctagggatcatgtga

SEQ ID NO: 694 - DNA, 18 bp, synthetic construct
  misc_feature 1..18: note = Synthetic
  source 1..18: mol_type = other DNA
catttctagggatcatgt

SEQ ID NO: 695 - DNA, 18 bp, synthetic construct
  misc_feature 1..18: note = Synthetic
  source 1..18: mol_type = other DNA
cccatttctagggatcat

SEQ ID NO: 696 - DNA, 18 bp, synthetic construct
  misc_feature 1..18: note = Synthetic
  source 1..18: mol_type = other DNA
accccatttctagggatc

SEQ ID NO: 697 - DNA, 18 bp, synthetic construct
  misc_feature 1..18: note = Synthetic
  source 1..18: mol_type = other DNA
acaccccatttctaggga

SEQ ID NO: 698 - DNA, 18 bp, synthetic construct
  misc_feature 1..18: note = Synthetic
  source 1..18: mol_type = other DNA
ccacaccccatttctagg

SEQ ID NO: 699 - DNA, 18 bp, synthetic construct
  misc_feature 1..18: note = Synthetic
  source 1..18: mol_type = other DNA
ccccacaccccatttcta

SEQ ID NO: 700 - DNA, 18 bp, synthetic construct
  misc_feature 1..18: note = Synthetic
  source 1..18: mol_type = other DNA
cgccccacaccccatttc

SEQ ID NO: 701 - DNA, 18 bp, synthetic construct
  misc_feature 1..18: note = Synthetic
  source 1..18: mol_type = other DNA
ctcgccccacaccccatt

SEQ ID NO: 702 - DNA, 18 bp, synthetic construct
  misc_feature 1..18: note = Synthetic
  source 1..18: mol_type = other DNA
ctctcgccccacacccca

SEQ ID NO: 703 - DNA, 18 bp, synthetic construct
  misc_feature 1..18: note = Synthetic
  source 1..18: mol_type = other DNA
tcctctcgccccacaccc

SEQ ID NO: 704 - DNA, 18 bp, synthetic construct
  misc_feature 1..18: note = Synthetic
  source 1..18: mol_type = other DNA
cttcctctcgccccacac

SEQ ID NO: 705 - DNA, 18 bp, synthetic construct
  misc_feature 1..18: note = Synthetic
  source 1..18: mol_type = other DNA
tgcttcctctcgccccac

SEQ ID NO: 706 - DNA, 18 bp, synthetic construct
  misc_feature 1..18: note = Synthetic
  source 1..18: mol_type = other DNA
cctgcttcctctcgcccc

SEQ ID NO: 707 - DNA, 18 bp, synthetic construct
  misc_feature 1..18: note = Synthetic
  source 1..18: mol_type = other DNA
tggccagggatcagggct

SEQ ID NO: 708 - DNA, 18 bp, synthetic construct
  misc_feature 1..18: note = Synthetic
  source 1..18: mol_type = other DNA
ttggccagggatcagggc

SEQ ID NO: 709 - DNA, 18 bp, synthetic construct
  misc_feature 1..18: note = Synthetic
  source 1..18: mol_type = other DNA
attggccagggatcaggg

SEQ ID NO: 710 - DNA, 16 bp, synthetic construct
  misc_feature 1..16: note = Synthetic
  source 1..16: mol_type = other DNA
tggccagggatcaggg

SEQ ID NO: 711 - DNA, 18 bp, synthetic construct
  misc_feature 1..18: note = Synthetic
  source 1..18: mol_type = other DNA
ctgcgtccgactccgcgg

SEQ ID NO: 712 - DNA, 18 bp, synthetic construct
  misc_feature 1..18: note = Synthetic
  source 1..18: mol_type = other DNA
acctgcgtccgactccgc

SEQ ID NO: 713 - DNA, 18 bp, synthetic construct
  misc_feature 1..18: note = Synthetic
  source 1..18: mol_type = other DNA
ctacctgcgtccgactcc

SEQ ID NO: 714 - DNA, 18 bp, synthetic construct
  misc_feature 1..18: note = Synthetic
  source 1..18: mol_type = other DNA
tcctacctgcgtccgact

SEQ ID NO: 715 - DNA, 18 bp, synthetic construct
  misc_feature 1..18: note = Synthetic
  source 1..18: mol_type = other DNA
tctcctacctgcgtccga

SEQ ID NO: 716 - DNA, 18 bp, synthetic construct
  misc_feature 1..18: note = Synthetic
  source 1..18: mol_type = other DNA
gctctcctacctgcgtcc

SEQ ID NO: 717 - DNA, 18 bp, synthetic construct
  misc_feature 1..18: note = Synthetic
  source 1..18: mol_type = other DNA
ccgctctcctacctgcgt

SEQ ID NO: 718 - DNA, 18 bp, synthetic construct
  misc_feature 1..18: note = Synthetic
  source 1..18: mol_type = other DNA
ggccgctctcctacctgc

SEQ ID NO: 719 - DNA, 18 bp, synthetic construct
  misc_feature 1..18: note = Synthetic
  source 1..18: mol_type = other DNA
gcggccgctctcctacct

SEQ ID NO: 720 - DNA, 18 bp, synthetic construct
  misc_feature 1..18: note = Synthetic
  source 1..18: mol_type = other DNA
gcgcggccgctctcctac

SEQ ID NO: 721 - DNA, 18 bp, synthetic construct
  misc_feature 1..18: note = Synthetic
  source 1..18: mol_type = other DNA
ctgcgcggccgctctcct

SEQ ID NO: 722 - DNA, 18 bp, synthetic construct
  misc_feature 1..18: note = Synthetic
  source 1..18: mol_type = other DNA
gtctgcgcggccgctctc

SEQ ID NO: 723 - DNA, 18 bp, synthetic construct
  misc_feature 1..18: note = Synthetic
  source 1..18: mol_type = other DNA
aggtctgcgcggccgctc

SEQ ID NO: 724 - DNA, 18 bp, synthetic construct
  misc_feature 1..18: note = Synthetic
  source 1..18: mol_type = other DNA
agaggtctgcgcggccgc

SEQ ID NO: 725 - DNA, 18 bp, synthetic construct
  misc_feature 1..18: note = Synthetic
  source 1..18: mol_type = other DNA
cgagaggtctgcgcggcc

SEQ ID NO: 726 - DNA, 18 bp, synthetic construct
  misc_feature 1..18: note = Synthetic
  source 1..18: mol_type = other DNA
ggcgagaggtctgcgcgg

SEQ ID NO: 727 - DNA, 18 bp, synthetic construct
  misc_feature 1..18: note = Synthetic
  source 1..18: mol_type = other DNA
caggcgagaggtctgcgc

SEQ ID NO: 728 - DNA, 18 bp, synthetic construct
  misc_feature 1..18: note = Synthetic
  source 1..18: mol_type = other DNA
agcaggcgagaggtctgc

SEQ ID NO: 729 - DNA, 18 bp, synthetic construct
  misc_feature 1..18: note = Synthetic
  source 1..18: mol_type = other DNA
ggagcaggcgagaggtct

SEQ ID NO: 730 - DNA, 18 bp, synthetic construct
  misc_feature 1..18: note = Synthetic
  source 1..18: mol_type = other DNA
caggagcaggcgagaggt

SEQ ID NO: 731 - DNA, 18 bp, synthetic construct
  misc_feature 1..18: note = Synthetic
  source 1..18: mol_type = other DNA
ggcaggagcaggcgagag

SEQ ID NO: 732 - DNA, 18 bp, synthetic construct
  misc_feature 1..18: note = Synthetic
  source 1..18: mol_type = other DNA
tgggcaggagcaggcgag

SEQ ID NO: 733 - DNA, 18 bp, synthetic construct
  misc_feature 1..18: note = Synthetic
  source 1..18: mol_type = other DNA
cctgggcaggagcaggcg

SEQ ID NO: 734 - DNA, 18 bp, synthetic construct
  misc_feature 1..18: note = Synthetic
  source 1..18: mol_type = other DNA
cccctgggcaggagcagg

SEQ ID NO: 735 - DNA, 18 bp, synthetic construct
  misc_feature 1..18: note = Synthetic
  source 1..18: mol_type = other DNA
ggcccctgggcaggagca

SEQ ID NO: 736 - DNA, 18 bp, synthetic construct
  misc_feature 1..18: note = Synthetic
  source 1..18: mol_type = other DNA
cgggcccctgggcaggag

SEQ ID NO: 737 - DNA, 18 bp, synthetic construct
  misc_feature 1..18: note = Synthetic
  source 1..18: mol_type = other DNA
ggcgggcccctgggcagg

SEQ ID NO: 738 - DNA, 18 bp, synthetic construct
  misc_feature 1..18: note = Synthetic
  source 1..18: mol_type = other DNA
ctggcgggcccctgggca

SEQ ID NO: 739 - DNA, 18 bp, synthetic construct
  misc_feature 1..18: note = Synthetic
  source 1..18: mol_type = other DNA
ccctggcgggcccctggg

SEQ ID NO: 740 - DNA, 18 bp, synthetic construct
  misc_feature 1..18: note = Synthetic
  source 1..18: mol_type = other DNA
ggccctggcgggcccctg

SEQ ID NO: 741 - DNA, 18 bp, synthetic construct
  misc_feature 1..18: note = Synthetic
  source 1..18: mol_type = other DNA
atggccctggcgggcccc

SEQ ID NO: 742 - DNA, 18 bp, synthetic construct
  misc_feature 1..18: note = Synthetic
  source 1..18: mol_type = other DNA
acatggccctggcgggcc

SEQ ID NO: 743 - DNA, 18 bp, synthetic construct
  misc_feature 1..18: note = Synthetic
  source 1..18: mol_type = other DNA
tcacatggccctggcggg

SEQ ID NO: 744 - DNA, 18 bp, synthetic construct
  misc_feature 1..18: note = Synthetic
  source 1..18: mol_type = other DNA
gctcacatggccctggcg

SEQ ID NO: 745 - DNA, 18 bp, synthetic construct
  misc_feature 1..18: note = Synthetic
  source 1..18: mol_type = other DNA
aagctcacatggccctgg

SEQ ID NO: 746 - DNA, 18 bp, synthetic construct
  misc_feature 1..18: note = Synthetic
  source 1..18: mol_type = other DNA
tcaagctcacatggccct

SEQ ID NO: 747 - DNA, 18 bp, synthetic construct
  misc_feature 1..18: note = Synthetic
  source 1..18: mol_type = other DNA
ctcaagctcacatggccc

SEQ ID NO: 748 - DNA, 18 bp, synthetic construct
  misc_feature 1..18: note = Synthetic
  source 1..18: mol_type = other DNA
cctcaagctcacatggcc

SEQ ID NO: 749 - DNA, 16 bp, synthetic construct
  misc_feature 1..16: note = Synthetic
  source 1..16: mol_type = other DNA
ctcaagctcacatggc

SEQ ID NO: 750 - DNA, 18 bp, synthetic construct
  misc_feature 1..18: note = Synthetic
  source 1..18: mol_type = other DNA
acctcaagctcacatggc

SEQ ID NO: 751 - DNA, 18 bp, synthetic construct
  misc_feature 1..18: note = Synthetic
  source 1..18: mol_type = other DNA
aacctcaagctcacatgg

SEQ ID NO: 752 - DNA, 18 bp, synthetic construct
  misc_feature 1..18: note = Synthetic
  source 1..18: mol_type = other DNA
ggaacctcaagctcacat

SEQ ID NO: 753 - DNA, 18 bp, synthetic construct
  misc_feature 1..18: note = Synthetic
  source 1..18: mol_type = other DNA
ggggaacctcaagctcac

SEQ ID NO: 754 - DNA, 18 bp, synthetic construct
  misc_feature 1..18: note = Synthetic
  source 1..18: mol_type = other DNA
caggggaacctcaagctc

SEQ ID NO: 755 - DNA, 18 bp, synthetic construct
  misc_feature 1..18: note = Synthetic
  source 1..18: mol_type = other DNA
tccaggggaacctcaagc

SEQ ID NO: 756 - DNA, 18 bp, synthetic construct
  misc_feature 1..18: note = Synthetic
  source 1..18: mol_type = other DNA
actccaggggaacctcaa

SEQ ID NO: 757 - DNA, 18 bp, synthetic construct
  misc_feature 1..18: note = Synthetic
  source 1..18: mol_type = other DNA
agactccaggggaacctc

SEQ ID NO: 758 - DNA, 18 bp, synthetic construct
  misc_feature 1..18: note = Synthetic
  source 1..18: mol_type = other DNA
tgagactccaggggaacc

SEQ ID NO: 759 - DNA, 18 bp, synthetic construct
  misc_feature 1..18: note = Synthetic
  source 1..18: mol_type = other DNA
gctgagactccaggggaa

SEQ ID NO: 760 - DNA, 18 bp, synthetic construct
  misc_feature 1..18: note = Synthetic
  source 1..18: mol_type = other DNA
cggctgagactccagggg

SEQ ID NO: 761 - DNA, 18 bp, synthetic construct
  misc_feature 1..18: note = Synthetic
  source 1..18: mol_type = other DNA
tccggctgagactccagg

SEQ ID NO: 762 - DNA, 18 bp, synthetic construct
  misc_feature 1..18: note = Synthetic
  source 1..18: mol_type = other DNA
tctccggctgagactcca

SEQ ID NO: 763 - DNA, 18 bp, synthetic construct
  misc_feature 1..18: note = Synthetic
  source 1..18: mol_type = other DNA
tgtctccggctgagactc

SEQ ID NO: 764 - DNA, 18 bp, synthetic construct
  misc_feature 1..18: note = Synthetic
  source 1..18: mol_type = other DNA
gttgtctccggctgagac

SEQ ID NO: 765 - DNA, 18 bp, synthetic construct
  misc_feature 1..18: note = Synthetic
  source 1..18: mol_type = other DNA
ctgttgtctccggctgag

SEQ ID NO: 766 - DNA, 18 bp, synthetic construct
  misc_feature 1..18: note = Synthetic
  source 1..18: mol_type = other DNA
ttctgttgtctccggctg

SEQ ID NO: 767 - DNA, 18 bp, synthetic construct
  misc_feature 1..18: note = Synthetic
  source 1..18: mol_type = other DNA
tcttctgttgtctccggc

SEQ ID NO: 768 - DNA, 18 bp, synthetic construct
  misc_feature 1..18: note = Synthetic
  source 1..18: mol_type = other DNA
gttcttctgttgtctccg

SEQ ID NO: 769 - DNA, 18 bp, synthetic construct
  misc_feature 1..18: note = Synthetic
  source 1..18: mol_type = other DNA
cggttcttctgttgtctc

SEQ ID NO: 770 - DNA, 18 bp, synthetic construct
  misc_feature 1..18: note = Synthetic
  source 1..18: mol_type = other DNA
agcggttcttctgttgtc

SEQ ID NO: 771 - DNA, 18 bp, synthetic construct
  misc_feature 1..18: note = Synthetic
  source 1..18: mol_type = other DNA
taagcggttcttctgttg

SEQ ID NO: 772 - DNA, 18 bp, synthetic construct
  misc_feature 1..18: note = Synthetic
  source 1..18: mol_type = other DNA
agtaagcggttcttctgt

SEQ ID NO: 773 - DNA, 18 bp, synthetic construct
  misc_feature 1..18: note = Synthetic
  source 1..18: mol_type = other DNA
tcagtaagcggttcttct

SEQ ID NO: 774 - DNA, 18 bp, synthetic construct
  misc_feature 1..18: note = Synthetic
  source 1..18: mol_type = other DNA
tttcagtaagcggttctt

SEQ ID NO: 775 - DNA, 18 bp, synthetic construct
  misc_feature 1..18: note = Synthetic
  source 1..18: mol_type = other DNA
agtttcagtaagcggttc

SEQ ID NO: 776 - DNA, 18 bp, synthetic construct
  misc_feature 1..18: note = Synthetic
  source 1..18: mol_type = other DNA
ggagtttcagtaagcggt

SEQ ID NO: 777 - DNA, 18 bp, synthetic construct
  misc_feature 1..18: note = Synthetic
  source 1..18: mol_type = other DNA
aaggagtttcagtaagcg

SEQ ID NO: 778 - DNA, 18 bp, synthetic construct
  misc_feature 1..18: note = Synthetic
  source 1..18: mol_type = other DNA
ccaaggagtttcagtaag

SEQ ID NO: 779 - DNA, 18 bp, synthetic construct
  misc_feature 1..18: note = Synthetic
  source 1..18: mol_type = other DNA
ccccaaggagtttcagta

SEQ ID NO: 780 - DNA, 18 bp, synthetic construct
  misc_feature 1..18: note = Synthetic
  source 1..18: mol_type = other DNA
acccccaaggagtttcag

SEQ ID NO: 781 - DNA, 18 bp, synthetic construct
  misc_feature 1..18: note = Synthetic
  source 1..18: mol_type = other DNA
gaacccccaaggagtttc

SEQ ID NO: 782 - DNA, 18 bp, synthetic construct
  misc_feature 1..18: note = Synthetic
  source 1..18: mol_type = other DNA
cagaacccccaaggagtt

SEQ ID NO: 783 - DNA, 18 bp, synthetic construct
  misc_feature 1..18: note = Synthetic
  source 1..18: mol_type = other DNA
atcagaacccccaaggag

SEQ ID NO: 784 - DNA, 18 bp, synthetic construct
  misc_feature 1..18: note = Synthetic
  source 1..18: mol_type = other DNA
gtatcagaacccccaagg

SEQ ID NO: 785 - DNA, 18 bp, synthetic construct
  misc_feature 1..18: note = Synthetic
  source 1..18: mol_type = other DNA
gtgtatcagaacccccaa

SEQ ID NO: 786 - DNA, 18 bp, synthetic construct
  misc_feature 1..18: note = Synthetic
  source 1..18: mol_type = other DNA
tagtgtatcagaaccccc

SEQ ID NO: 787 - DNA, 18 bp, synthetic construct
  misc_feature 1..18: note = Synthetic
  source 1..18: mol_type = other DNA
cctagtgtatcagaaccc

SEQ ID NO: 788 - DNA, 18 bp, synthetic construct
  misc_feature 1..18: note = Synthetic
  source 1..18: mol_type = other DNA
cccctagtgtatcagaac

SEQ ID NO: 789 - DNA, 18 bp, synthetic construct
  misc_feature 1..18: note = Synthetic
  source 1..18: mol_type = other DNA
tccccctagtgtatcaga

SEQ ID NO: 790 - DNA, 18 bp, synthetic construct
  misc_feature 1..18: note = Synthetic
  source 1..18: mol_type = other DNA
actccccctagtgtatca

SEQ ID NO: 791 - DNA, 18 bp, synthetic construct
  misc_feature 1..18: note = Synthetic
  source 1..18: mol_type = other DNA
aaactccccctagtgtat

SEQ ID NO: 792 - DNA, 18 bp, synthetic construct
  misc_feature 1..18: note = Synthetic
  source 1..18: mol_type = other DNA
taaaactccccctagtgt

SEQ ID NO: 793 - DNA, 18 bp, synthetic construct
  misc_feature 1..18: note = Synthetic
  source 1..18: mol_type = other DNA
cataaaactccccctagt

SEQ ID NO: 794 - DNA, 18 bp, synthetic construct
  misc_feature 1..18: note = Synthetic
  source 1..18: mol_type = other DNA
cccataaaactcccccta

SEQ ID NO: 795 - DNA, 18 bp, synthetic construct
  misc_feature 1..18: note = Synthetic
  source 1..18: mol_type = other DNA
ttcccataaaactccccc

SEQ ID NO: 796 - DNA, 18 bp, synthetic construct
  misc_feature 1..18: note = Synthetic
  source 1..18: mol_type = other DNA
ctttcccataaaactccc

SEQ ID NO: 797 - DNA, 18 bp, synthetic construct
  misc_feature 1..18: note = Synthetic
  source 1..18: mol_type = other DNA
ctctttcccataaaactc

SEQ ID NO: 798 - DNA, 18 bp, synthetic construct
  misc_feature 1..18: note = Synthetic
  source 1..18: mol_type = other DNA
tcctctttcccataaaac

SEQ ID NO: 799 - DNA, 18 bp, synthetic construct
  misc_feature 1..18: note = Synthetic
  source 1..18: mol_type = other DNA
cttcctctttcccataaa

SEQ ID NO: 800 - DNA, 18 bp, synthetic construct
  misc_feature 1..18: note = Synthetic
  source 1..18: mol_type = other DNA
tgcttcctctttcccata

SEQ ID NO: 801 - DNA, 18 bp, synthetic construct
  misc_feature 1..18: note = Synthetic
  source 1..18: mol_type = other DNA
actgcttcctctttccca

SEQ ID NO: 802 - DNA, 18 bp, synthetic construct
  misc_feature 1..18: note = Synthetic
  source 1..18: mol_type = other DNA
ttactgcttcctctttcc

SEQ ID NO: 803 - DNA, 18 bp, synthetic construct
  misc_feature 1..18: note = Synthetic
  source 1..18: mol_type = other DNA
aattactgcttcctcttt

SEQ ID NO: 804 - DNA, 18 bp, synthetic construct
  misc_feature 1..18: note = Synthetic
  source 1..18: mol_type = other DNA
gcaattactgcttcctct

SEQ ID NO: 805 - DNA, 18 bp, synthetic construct
  misc_feature 1..18: note = Synthetic
  source 1..18: mol_type = other DNA
ctgcaattactgcttcct

SEQ ID NO: 806 - DNA, 18 bp, synthetic construct
  misc_feature 1..18: note = Synthetic
  source 1..18: mol_type = other DNA
cactgcaattactgcttc

SEQ ID NO: 807 - DNA, 18 bp, synthetic construct
  misc_feature 1..18: note = Synthetic
  source 1..18: mol_type = other DNA
gtcactgcaattactgct

SEQ ID NO: 808 - DNA, 18 bp, synthetic construct
  misc_feature 1..18: note = Synthetic
  source 1..18: mol_type = other DNA
gcgtcactgcaattactg

SEQ ID NO: 809 - DNA, 18 bp, synthetic construct
  misc_feature 1..18: note = Synthetic
  source 1..18: mol_type = other DNA
gggcgtcactgcaattac

SEQ ID NO: 810 - DNA, 18 bp, synthetic construct
  misc_feature 1..18: note = Synthetic
  source 1..18: mol_type = other DNA
cggggcgtcactgcaatt

SEQ ID NO: 811 - DNA, 18 bp, synthetic construct
  misc_feature 1..18: note = Synthetic
  source 1..18: mol_type = other DNA
aacggggcgtcactgcaa

SEQ ID NO: 812 - DNA, 18 bp, synthetic construct
  misc_feature 1..18: note = Synthetic
  source 1..18: mol_type = other DNA
ctaacggggcgtcactgc

SEQ ID NO: 813 - DNA, 18 bp, synthetic construct
  misc_feature 1..18: note = Synthetic
  source 1..18: mol_type = other DNA
ttctaacggggcgtcact

SEQ ID NO: 814 - DNA, 18 bp, synthetic construct
  misc_feature 1..18: note = Synthetic
  source 1..18: mol_type = other DNA
ccttctaacggggcgtca

SEQ ID NO: 815 - DNA, 18 bp, synthetic construct
  misc_feature 1..18: note = Synthetic
  source 1..18: mol_type = other DNA
ccccttctaacggggcgt

SEQ ID NO: 816 - DNA, 18 bp, synthetic construct
  misc_feature 1..18: note = Synthetic
  source 1..18: mol_type = other DNA
agccccttctaacggggc

SEQ ID NO: 817 - DNA, 18 bp, synthetic construct
  misc_feature 1..18: note = Synthetic
  source 1..18: mol_type = other DNA
aaagccccttctaacggg

SEQ ID NO: 818 - DNA, 18 bp, synthetic construct
  misc_feature 1..18: note = Synthetic
  source 1..18: mol_type = other DNA
agaaagccccttctaacg

SEQ ID NO: 819 - DNA, 18 bp, synthetic construct
  misc_feature 1..18: note = Synthetic
  source 1..18: mol_type = other DNA
gtagaaagccccttctaa

SEQ ID NO: 820 - DNA, 18 bp, synthetic construct
  misc_feature 1..18: note = Synthetic
  source 1..18: mol_type = other DNA
aggtagaaagccccttct

SEQ ID NO: 821 - DNA, 18 bp, synthetic construct
  misc_feature 1..18: note = Synthetic
  source 1..18: mol_type = other DNA
ggaggtagaaagcccctt

SEQ ID NO: 822 - DNA, 18 bp, synthetic construct
  misc_feature 1..18: note = Synthetic
  source 1..18: mol_type = other DNA
ggggaggtagaaagcccc

SEQ ID NO: 823 - DNA, 18 bp, synthetic construct
  misc_feature 1..18: note = Synthetic
  source 1..18: mol_type = other DNA
ctggggaggtagaaagcc

SEQ ID NO: 824 - DNA, 18 bp, synthetic construct
  misc_feature 1..18: note = Synthetic
  source 1..18: mol_type = other DNA
tgctggggaggtagaaag

SEQ ID NO: 825 - DNA, 18 bp, synthetic construct
  misc_feature 1..18: note = Synthetic
  source 1..18: mol_type = other DNA
aatgctggggaggtagaa

SEQ ID NO: 826 - DNA, 18 bp, synthetic construct
  misc_feature 1..18: note = Synthetic
  source 1..18: mol_type = other DNA
ggaatgctggggaggtag

SEQ ID NO: 827 - DNA, 18 bp, synthetic construct
  misc_feature 1..18: note = Synthetic
  source 1..18: mol_type = other DNA
ggggaatgctggggaggt

SEQ ID NO: 828 - DNA, 18 bp, synthetic construct
  misc_feature 1..18: note = Synthetic
  source 1..18: mol_type = other DNA
tgggggaatgctggggag

SEQ ID NO: 829 - DNA, 18 bp, synthetic construct
  misc_feature 1..18: note = Synthetic
  source 1..18: mol_type = other DNA
tttgggggaatgctgggg

SEQ ID NO: 830 - DNA, 18 bp, synthetic construct
  misc_feature 1..18: note = Synthetic
  source 1..18: mol_type = other DNA
gctttgggggaatgctgg

SEQ ID NO: 831 - DNA, 18 bp, synthetic construct
  misc_feature 1..18: note = Synthetic
  source 1..18: mol_type = other DNA
ctgctttgggggaatgct

SEQ ID NO: 832 - DNA, 18 bp, synthetic construct
  misc_feature 1..18: note = Synthetic
  source 1..18: mol_type = other DNA
ccctgctttgggggaatg

SEQ ID NO: 833 - DNA, 18 bp, synthetic construct
  misc_feature 1..18: note = Synthetic
  source 1..18: mol_type = other DNA
gtccctgctttgggggaa

SEQ ID NO: 834 - DNA, 18 bp, synthetic construct
  misc_feature 1..18: note = Synthetic
  source 1..18: mol_type = other DNA
tggtccctgctttggggg

SEQ ID NO: 835 - DNA, 18 bp, synthetic construct
  misc_feature 1..18: note = Synthetic
  source 1..18: mol_type = other DNA
tgtggtccctgctttggg

SEQ ID NO: 836 - DNA, 18 bp, synthetic construct
  misc_feature 1..18: note = Synthetic
  source 1..18: mol_type = other DNA
ggtgtggtccctgctttg

SEQ ID NO: 837 - DNA, 18 bp, synthetic construct
  misc_feature 1..18: note = Synthetic
  source 1..18: mol_type = other DNA
atggtgtggtccctgctt

SEQ ID NO: 838 - DNA, 18 bp, synthetic construct
  misc_feature 1..18: note = Synthetic
  source 1..18: mol_type = other DNA
gaatggtgtggtccctgc

SEQ ID NO: 839 - DNA, 18 bp, synthetic construct
  misc_feature 1..18: note = Synthetic
  source 1..18: mol_type = other DNA
agaatggtgtggtccctg

SEQ ID NO: 840 - DNA, 16 bp, synthetic construct
  misc_feature 1..16: note = Synthetic
  source 1..16: mol_type = other DNA
gaatggtgtggtccct

SEQ ID NO: 841 - DNA, 18 bp, synthetic construct
  misc_feature 1..18: note = Synthetic
  source 1..18: mol_type = other DNA
aagaatggtgtggtccct

SEQ ID NO: 842 - DNA, 18 bp, synthetic construct
  misc_feature 1..18: note = Synthetic
  source 1..18: mol_type = other DNA
caagaatggtgtggtccc

SEQ ID NO: 843 - DNA, 18 bp, synthetic construct
  misc_feature 1..18: note = Synthetic
  source 1..18: mol_type = other DNA
tcaagaatggtgtggtcc

SEQ ID NO: 844 - DNA, 16 bp, synthetic construct
  misc_feature 1..16: note = Synthetic
  source 1..16: mol_type = other DNA
caagaatggtgtggtc

SEQ ID NO: 845 - DNA, 18 bp, synthetic construct
  misc_feature 1..18: note = Synthetic
  source 1..18: mol_type = other DNA
gtcaagaatggtgtggtc

SEQ ID NO: 846 - DNA, 18 bp, synthetic construct
  misc_feature 1..18: note = Synthetic
  source 1..18: mol_type = other DNA
ggtcaagaatggtgtggt

SEQ ID NO: 847 - DNA, 18 bp, synthetic construct
  misc_feature 1..18: note = Synthetic
  source 1..18: mol_type = other DNA
gggtcaagaatggtgtgg

SEQ ID NO: 848 - DNA, 16 bp, synthetic construct
  misc_feature 1..16: note = Synthetic
  source 1..16: mol_type = other DNA
ggtcaagaatggtgtg

SEQ ID NO: 849 - DNA, 18 bp, synthetic construct
  misc_feature 1..18: note = Synthetic
  source 1..18: mol_type = other DNA
tgggtcaagaatggtgtg

SEQ ID NO: 850 - DNA, 18 bp, synthetic construct
  misc_feature 1..18: note = Synthetic
  source 1..18: mol_type = other DNA
gctgggtcaagaatggtg

SEQ ID NO: 851 - DNA, 18 bp, synthetic construct
  misc_feature 1..18: note = Synthetic
  source 1..18: mol_type = other DNA
gagctgggtcaagaatgg

SEQ ID NO: 852 - DNA, 18 bp, synthetic construct
  misc_feature 1..18: note = Synthetic
  source 1..18: mol_type = other DNA
tggagctgggtcaagaat

SEQ ID NO: 853 - DNA, 18 bp, synthetic construct
  misc_feature 1..18: note = Synthetic
  source 1..18: mol_type = other DNA
ggtggagctgggtcaaga

SEQ ID NO: 854 - DNA, 18 bp, synthetic construct
  misc_feature 1..18: note = Synthetic
  source 1..18: mol_type = other DNA
ggggtggagctgggtcaa

SEQ ID NO: 855 - DNA, 18 bp, synthetic construct
  misc_feature 1..18: note = Synthetic
  source 1..18: mol_type = other DNA
caggggtggagctgggtc

SEQ ID NO: 856 - DNA, 18 bp, synthetic construct
  misc_feature 1..18: note = Synthetic
  source 1..18: mol_type = other DNA
gacaggggtggagctggg

SEQ ID NO: 857 - DNA, 18 bp, synthetic construct
  misc_feature 1..18: note = Synthetic
  source 1..18: mol_type = other DNA
ccgacaggggtggagctg

SEQ ID NO: 858 - DNA, 18 bp, synthetic construct
  misc_feature 1..18: note = Synthetic
  source 1..18: mol_type = other DNA
taccgacaggggtggagc

SEQ ID NO: 859 - DNA, 18 bp, synthetic construct
  misc_feature 1..18: note = Synthetic
  source 1..18: mol_type = other DNA
cctaccgacaggggtgga

SEQ ID NO: 860 - DNA, 18 bp, synthetic construct
  misc_feature 1..18: note = Synthetic
  source 1..18: mol_type = other DNA
cacctaccgacaggggtg

SEQ ID NO: 861 - DNA, 18 bp, synthetic construct
  misc_feature 1..18: note = Synthetic
  source 1..18: mol_type = other DNA
agcacctaccgacagggg

SEQ ID NO: 862 - DNA, 18 bp, synthetic construct
  misc_feature 1..18: note = Synthetic
  source 1..18: mol_type = other DNA
ccagcacctaccgacagg

SEQ ID NO: 863 - DNA, 18 bp, synthetic construct
  misc_feature 1..18: note = Synthetic
  source 1..18: mol_type = other DNA
agccagcacctaccgaca

SEQ ID NO: 864 - DNA, 18 bp, synthetic construct
  misc_feature 1..18: note = Synthetic
  source 1..18: mol_type = other DNA
gaagccagcacctaccga

SEQ ID NO: 865 - DNA, 18 bp, synthetic construct
  misc_feature 1..18: note = Synthetic
  source 1..18: mol_type = other DNA
aagaagccagcacctacc

SEQ ID NO: 866 - DNA, 18 bp, synthetic construct
  misc_feature 1..18: note = Synthetic
  source 1..18: mol_type = other DNA
ggaagaagccagcaccta

SEQ ID NO: 867 - DNA, 18 bp, synthetic construct
  misc_feature 1..18: note = Synthetic
  source 1..18: mol_type = other DNA
ggggaagaagccagcacc

SEQ ID NO: 868 - DNA, 18 bp, synthetic construct
  misc_feature 1..18: note = Synthetic
  source 1..18: mol_type = other DNA
gaggggaagaagccagca

SEQ ID NO: 869 - DNA, 18 bp, synthetic construct
  misc_feature 1..18: note = Synthetic
  source 1..18: mol_type = other DNA
gagaggggaagaagccag

SEQ ID NO: 870 - DNA, 18 bp, synthetic construct
  misc_feature 1..18: note = Synthetic
  source 1..18: mol_type = other DNA
aggagaggggaagaagcc

SEQ ID NO: 871 - DNA, 18 bp, synthetic construct
  misc_feature 1..18: note = Synthetic
  source 1..18: mol_type = other DNA
ccaggagaggggaagaag

SEQ ID NO: 872 - DNA, 18 bp, synthetic construct
  misc_feature 1..18: note = Synthetic
  source 1..18: mol_type = other DNA
caccaggagaggggaaga

SEQ ID NO: 873 - DNA, 18 bp, synthetic construct
  misc_feature 1..18: note = Synthetic
  source 1..18: mol_type = other DNA
accaccaggagaggggaa

SEQ ID NO: 874 - DNA, 18 bp, synthetic construct
  misc_feature 1..18: note = Synthetic
  source 1..18: mol_type = other DNA
ccaccaccaggagagggg

SEQ ID NO: 875 - DNA, 18 bp, synthetic construct
  misc_feature 1..18: note = Synthetic
  source 1..18: mol_type = other DNA
caccaccaccaggagagg

SEQ ID NO: 876 - DNA, 18 bp, synthetic construct
  misc_feature 1..18: note = Synthetic
  source 1..18: mol_type = other DNA
cccaccaccaccaggaga

SEQ ID NO: 877 - DNA, 18 bp, synthetic construct
  misc_feature 1..18: note = Synthetic
  source 1..18: mol_type = other DNA
cacccaccaccaccagga

SEQ ID NO: 878 - DNA, 18 bp, synthetic construct
  misc_feature 1..18: note = Synthetic
  source 1..18: mol_type = other DNA
accacccaccaccaccag

SEQ ID NO: 879 - DNA, 18 bp, synthetic construct
  misc_feature 1..18: note = Synthetic
  source 1..18: mol_type = other DNA
gaaccacccaccaccacc

SEQ ID NO: 880 - DNA, 18 bp, synthetic construct
  misc_feature 1..18: note = Synthetic
  source 1..18: mol_type = other DNA
gggaaccacccaccacca

SEQ ID NO: 881 - DNA, 18 bp, synthetic construct
  misc_feature 1..18: note = Synthetic
  source 1..18: mol_type = other DNA
gcgggaaccacccaccac

SEQ ID NO: 882 - DNA, 18 bp, synthetic construct
  misc_feature 1..18: note = Synthetic
  source 1..18: mol_type = other DNA
cctcctgtttaccctaaa

SEQ ID NO: 883 - DNA, 18 bp, synthetic construct
  misc_feature 1..18: note = Synthetic
  source 1..18: mol_type = other DNA
cccctcctgtttacccta

SEQ ID NO: 884 - DNA, 18 bp, synthetic construct
  misc_feature 1..18: note = Synthetic
  source 1..18: mol_type = other DNA
ggcccctcctgtttaccc

SEQ ID NO: 885 - DNA, 18 bp, synthetic construct
  misc_feature 1..18: note = Synthetic
  source 1..18: mol_type = other DNA
gtggcccctcctgtttac

SEQ ID NO: 886 - DNA, 18 bp, synthetic construct
  misc_feature 1..18: note = Synthetic
  source 1..18: mol_type = other DNA
atgtggcccctcctgttt

SEQ ID NO: 887 - DNA, 18 bp, synthetic construct
  misc_feature 1..18: note = Synthetic
  source 1..18: mol_type = other DNA
gcatgtggcccctcctgt

SEQ ID NO: 888 - DNA, 18 bp, synthetic construct
  misc_feature 1..18: note = Synthetic
  source 1..18: mol_type = other DNA
gtgcatgtggcccctcct

SEQ ID NO: 889 - DNA, 18 bp, synthetic construct
  misc_feature 1..18: note = Synthetic
  source 1..18: mol_type = other DNA
ctgtgcatgtggcccctc

SEQ ID NO: 890 - DNA, 18 bp, synthetic construct
  misc_feature 1..18: note = Synthetic
  source 1..18: mol_type = other DNA
acctgtgcatgtggcccc

SEQ ID NO: 891 - DNA, 18 bp, synthetic construct
  misc_feature 1..18: note = Synthetic
  source 1..18: mol_type = other DNA
ttacctgtgcatgtggcc

SEQ ID NO: 892 - DNA, 18 bp, synthetic construct
  misc_feature 1..18: note = Synthetic
  source 1..18: mol_type = other DNA
aattacctgtgcatgtgg

SEQ ID NO: 893 - DNA, 18 bp, synthetic construct
  misc_feature 1..18: note = Synthetic
  source 1..18: mol_type = other DNA
tgaattacctgtgcatgt

SEQ ID NO: 894 - DNA, 18 bp, synthetic construct
  misc_feature 1..18: note = Synthetic
  source 1..18: mol_type = other DNA
ggtgaattacctgtgcat

SEQ ID NO: 895 - DNA, 18 bp, synthetic construct
  misc_feature 1..18: note = Synthetic
  source 1..18: mol_type = other DNA
ctggtgaattacctgtgc

SEQ ID NO: 896 - DNA, 18 bp, synthetic construct
  misc_feature 1..18: note = Synthetic
  source 1..18: mol_type = other DNA
ccctggtgaattacctgt

SEQ ID NO: 897 - DNA, 18 bp, synthetic construct
  misc_feature 1..18: note = Synthetic
  source 1..18: mol_type = other DNA
ctccctggtgaattacct

SEQ ID NO: 898 - DNA, 18 bp, synthetic construct
  misc_feature 1..18: note = Synthetic
  source 1..18: mol_type = other DNA
ggctccctggtgaattac

SEQ ID NO: 899 - DNA, 18 bp, synthetic construct
  misc_feature 1..18: note = Synthetic
  source 1..18: mol_type = other DNA
tcggctccctggtgaatt

SEQ ID NO: 900 - DNA, 18 bp, synthetic construct
  misc_feature 1..18: note = Synthetic
  source 1..18: mol_type = other DNA
gttcggctccctggtgaa

SEQ ID NO: 901 - DNA, 18 bp, synthetic construct
  misc_feature 1..18: note = Synthetic
  source 1..18: mol_type = other DNA
gtgttcggctccctggtg

SEQ ID NO: 902 - DNA, 18 bp, synthetic construct
  misc_feature 1..18: note = Synthetic
  source 1..18: mol_type = other DNA
gagtgttcggctccctgg

SEQ ID NO: 903 - DNA, 18 bp, synthetic construct
  misc_feature 1..18: note = Synthetic
  source 1..18: mol_type = other DNA
aggagtgttcggctccct

SEQ ID NO: 904 - DNA, 18 bp, synthetic construct
  misc_feature 1..18: note = Synthetic
  source 1..18: mol_type = other DNA
acaggagtgttcggctcc

SEQ ID NO: 905 - DNA, 18 bp, synthetic construct
  misc_feature 1..18: note = Synthetic
  source 1..18: mol_type = other DNA
gcacaggagtgttcggct

SEQ ID NO: 906 - DNA, 18 bp, synthetic construct
  misc_feature 1..18: note = Synthetic
  source 1..18: mol_type = other DNA
tggataccactgcggggg

SEQ ID NO: 907 - DNA, 18 bp, synthetic construct
  misc_feature 1..18: note = Synthetic
  source 1..18: mol_type = other DNA
tgtggataccactgcggg

SEQ ID NO: 908 - DNA, 18 bp, synthetic construct
  misc_feature 1..18: note = Synthetic
  source 1..18: mol_type = other DNA
ggtgtggataccactgcg

SEQ ID NO: 909 - DNA, 18 bp, synthetic construct
  misc_feature 1..18: note = Synthetic
  source 1..18: mol_type = other DNA
tgggaatggtgcaacagg

SEQ ID NO: 910 - DNA, 18 bp, synthetic construct
  misc_feature 1..18: note = Synthetic
  source 1..18: mol_type = other DNA
cctgggaatggtgcaaca

SEQ ID NO: 911 - DNA, 18 bp, synthetic construct
  misc_feature 1..18: note = Synthetic
  source 1..18: mol_type = other DNA
tgcctgggaatggtgcaa

SEQ ID NO: 912 - DNA, 18 bp, synthetic construct
  misc_feature 1..18: note = Synthetic
  source 1..18: mol_type = other DNA
agtgcctgggaatggtgc

SEQ ID NO: 913 - DNA, 18 bp, synthetic construct
  misc_feature 1..18: note = Synthetic
  source 1..18: mol_type = other DNA
acacctataacacgtcac

SEQ ID NO: 914 - DNA, 18 bp, synthetic construct
  misc_feature 1..18: note = Synthetic
  source 1..18: mol_type = other DNA
ggacacctataacacgtc

SEQ ID NO: 915 - DNA, 18 bp, synthetic construct
  misc_feature 1..18: note = Synthetic
  source 1..18: mol_type = other DNA
agggacacctataacacg

SEQ ID NO: 916 - DNA, 18 bp, synthetic construct
  misc_feature 1..18: note = Synthetic
  source 1..18: mol_type = other DNA
cagccgacatgtcatttc

SEQ ID NO: 917 - DNA, 18 bp, synthetic construct
  misc_feature 1..18: note = Synthetic
  source 1..18: mol_type = other DNA
cccagccgacatgtcatt

SEQ ID NO: 918 - DNA, 18 bp, synthetic construct
  misc_feature 1..18: note = Synthetic
  source 1..18: mol_type = other DNA
cgcccagccgacatgtca

SEQ ID NO: 919 - DNA, 18 bp, synthetic construct
  misc_feature 1..18: note = Synthetic
  source 1..18: mol_type = other DNA
cacgcccagccgacatgt

SEQ ID NO: 920 - DNA, 18 bp, synthetic construct
  misc_feature 1..18: note = Synthetic
  source 1..18: mol_type = other DNA
accacgcccagccgacat

SEQ ID NO: 921 - DNA, 18 bp, synthetic construct
  misc_feature 1..18: note = Synthetic
  source 1..18: mol_type = other DNA
atggcatttctttttctt

SEQ ID NO: 922 - DNA, 18 bp, synthetic construct
  misc_feature 1..18: note = Synthetic
  source 1..18: mol_type = other DNA
acatggcatttctttttc

SEQ ID NO: 923 - DNA, 18 bp, synthetic construct
  misc_feature 1..18: note = Synthetic
  source 1..18: mol_type = other DNA
ttacatggcatttctttt

SEQ ID NO: 924 - DNA, 18 bp, synthetic construct
  misc_feature 1..18: note = Synthetic
  source 1..18: mol_type = other DNA
atttacatggcatttctt

SEQ ID NO: 925 - DNA, 18 bp, synthetic construct
  misc_feature 1..18: note = Synthetic
  source 1..18: mol_type = other DNA
ggcttacgatgggtgcat

SEQ ID NO: 926 - DNA, 18 bp, synthetic construct
  misc_feature 1..18: note = Synthetic
  source 1..18: mol_type = other DNA
taggcttacgatgggtgc

SEQ ID NO: 927 - DNA, 18 bp, synthetic construct
  misc_feature 1..18: note = Synthetic
  source 1..18: mol_type = other DNA
gttaggcttacgatgggt

SEQ ID NO: 928 - DNA, 18 bp, synthetic construct
  misc_feature 1..18: note = Synthetic
  source 1..18: mol_type = other DNA
tagttaggcttacgatgg

SEQ ID NO: 929 - DNA, 18 bp, synthetic construct
  misc_feature 1..18: note = Synthetic
  source 1..18: mol_type = other DNA
aaaaaacccctgaaaatg

SEQ ID NO: 930 - DNA, 18 bp, synthetic construct
  misc_feature 1..18: note = Synthetic
  source 1..18: mol_type = other DNA
caaaaaaacccctgaaaa

SEQ ID NO: 931 - DNA, 18 bp, synthetic construct
  misc_feature 1..18: note = Synthetic
  source 1..18: mol_type = other DNA
aacaaaaaaacccctgaa

SEQ ID NO: 932 - DNA, 18 bp, synthetic construct
  misc_feature 1..18: note = Synthetic
  source 1..18: mol_type = other DNA
atatattgggcgcggtgg

SEQ ID NO: 933 - DNA, 18 bp, synthetic construct
  misc_feature 1..18: note = Synthetic
  source 1..18: mol_type = other DNA
aaatatattgggcgcggt

SEQ ID NO: 934 - DNA, 18 bp, synthetic construct
  misc_feature 1..18: note = Synthetic
  source 1..18: mol_type = other DNA
caaaatatattgggcgcg

SEQ ID NO: 935 - DNA, 18 bp, synthetic construct
  misc_feature 1..18: note = Synthetic
  source 1..18: mol_type = other DNA
atcaaaatatattgggcg

SEQ ID NO: 936 - DNA, 18 bp, synthetic construct
  misc_feature 1..18: note = Synthetic
  source 1..18: mol_type = other DNA
taagtacagtcagccctc

SEQ ID NO: 937 - DNA, 18 bp, synthetic construct
  misc_feature 1..18: note = Synthetic
  source 1..18: mol_type = other DNA
gttaagtacagtcagccc

SEQ ID NO: 938 - DNA, 18 bp, synthetic construct
  misc_feature 1..18: note = Synthetic
  source 1..18: mol_type = other DNA
atgttaagtacagtcagc

SEQ ID NO: 939 - DNA, 18 bp, synthetic construct
  misc_feature 1..18: note = Synthetic
  source 1..18: mol_type = other DNA
cagccacacctttatttt

SEQ ID NO: 940 - DNA, 18 bp, synthetic construct
  misc_feature 1..18: note = Synthetic
  source 1..18: mol_type = other DNA
cccagccacacctttatt

SEQ ID NO: 941 - DNA, 18 bp, synthetic construct
  misc_feature 1..18: note = Synthetic
  source 1..18: mol_type = other DNA
cacccagccacaccttta

SEQ ID NO: 942 - DNA, 18 bp, synthetic construct
  misc_feature 1..18: note = Synthetic
  source 1..18: mol_type = other DNA
cacacccagccacacctt

SEQ ID NO: 943 - DNA, 18 bp, synthetic construct
  misc_feature 1..18: note = Synthetic
  source 1..18: mol_type = other DNA
accacacccagccacacc

SEQ ID NO: 944 - DNA, 18 bp, synthetic construct
  misc_feature 1..18: note = Synthetic
  source 1..18: mol_type = other DNA
tcaccccctttttttttt

SEQ ID NO: 945 - DNA, 18 bp, synthetic construct
  misc_feature 1..18: note = Synthetic
  source 1..18: mol_type = other DNA
gctcaccccctttttttt

SEQ ID NO: 946 - DNA, 18 bp, synthetic construct
  misc_feature 1..18: note = Synthetic
  source 1..18: mol_type = other DNA
ctgctcaccccctttttt

SEQ ID NO: 947 - DNA, 18 bp, synthetic construct
  misc_feature 1..18: note = Synthetic
  source 1..18: mol_type = other DNA
gtctgctcaccccctttt

SEQ ID NO: 948 - DNA, 18 bp, synthetic construct
  misc_feature 1..18: note = Synthetic
  source 1..18: mol_type = other DNA
acgtctgctcaccccctt

SEQ ID NO: 949 - DNA, 18 bp, synthetic construct
  misc_feature 1..18: note = Synthetic
  source 1..18: mol_type = other DNA
ccacgtctgctcaccccc

SEQ ID NO: 950 - DNA, 18 bp, synthetic construct
  misc_feature 1..18: note = Synthetic
  source 1..18: mol_type = other DNA
caccacgtctgctcaccc

SEQ ID NO: 951 - DNA, 18 bp, synthetic construct
  misc_feature 1..18: note = Synthetic
  source 1..18: mol_type = other DNA
ctttacttttattttatt

SEQ ID NO: 952 - DNA, 18 bp, synthetic construct
  misc_feature 1..18: note = Synthetic
  source 1..18: mol_type = other DNA
acctttacttttatttta

SEQ ID NO: 953 - DNA, 18 bp, synthetic construct
  misc_feature 1..18: note = Synthetic
  source 1..18: mol_type = other DNA
atacctttacttttattt

SEQ ID NO: 954 - DNA, 18 bp, synthetic construct
  misc_feature 1..18: note = Synthetic
  source 1..18: mol_type = other DNA
taatacctttacttttat

SEQ ID NO: 955 - DNA, 18 bp, synthetic construct
  misc_feature 1..18: note = Synthetic
  source 1..18: mol_type = other DNA
aaacagtaatgtctgttg

SEQ ID NO: 956 - DNA, 18 bp, synthetic construct
  misc_feature 1..18: note = Synthetic
  source 1..18: mol_type = other DNA
aaaaacagtaatgtctgt

SEQ ID NO: 957 - DNA, 18 bp, synthetic construct
  misc_feature 1..18: note = Synthetic
  source 1..18: mol_type = other DNA
gcaaaaacagtaatgtct

SEQ ID NO: 958 - DNA, 18 bp, synthetic construct
  misc_feature 1..18: note = Synthetic
  source 1..18: mol_type = other DNA
aagcaaaaacagtaatgt

SEQ ID NO: 959 - DNA, 18 bp, synthetic construct
  misc_feature 1..18: note = Synthetic
  source 1..18: mol_type = other DNA
ttaagcccacgccaccct

SEQ ID NO: 960 - DNA, 18 bp, synthetic construct
  misc_feature 1..18: note = Synthetic
  source 1..18: mol_type = other DNA
gcttaagcccacgccacc

SEQ ID NO: 961 - DNA, 18 bp, synthetic construct
  misc_feature 1..18: note = Synthetic
  source 1..18: mol_type = other DNA
ctgcttaagcccacgcca

SEQ ID NO: 962 - DNA, 18 bp, synthetic construct
  misc_feature 1..18: note = Synthetic
  source 1..18: mol_type = other DNA
aactgcttaagcccacgc

SEQ ID NO: 963 - DNA, 18 bp, synthetic construct
  misc_feature 1..18: note = Synthetic
  source 1..18: mol_type = other DNA
gcaactgcttaagcccac

SEQ ID NO: 964 - DNA, 18 bp, synthetic construct
  misc_feature 1..18: note = Synthetic
  source 1..18: mol_type = other DNA
tggcaactgcttaagccc

SEQ ID NO: 965 - DNA, 18 bp, synthetic construct
  misc_feature 1..18: note = Synthetic
  source 1..18: mol_type = other DNA
tctggcaactgcttaagc

SEQ ID NO: 966 - DNA, 18 bp, synthetic construct
  misc_feature 1..18: note = Synthetic
  source 1..18: mol_type = other DNA
cgtctggcaactgcttaa

SEQ ID NO: 967 - DNA, 18 bp, synthetic construct
  misc_feature 1..18: note = Synthetic
  source 1..18: mol_type = other DNA
aacgtctggcaactgctt

SEQ ID NO: 968 - DNA, 18 bp, synthetic construct
  misc_feature 1..18: note = Synthetic
  source 1..18: mol_type = other DNA
ggaacgtctggcaactgc

SEQ ID NO: 969 - DNA, 18 bp, synthetic construct
  misc_feature 1..18: note = Synthetic
  source 1..18: mol_type = other DNA
aaggaacgtctggcaact

SEQ ID NO: 970 - DNA, 18 bp, synthetic construct
  misc_feature 1..18: note = Synthetic
  source 1..18: mol_type = other DNA
ccaaggaacgtctggcaa

SEQ ID NO: 971 - DNA, 18 bp, synthetic construct
  misc_feature 1..18: note = Synthetic
  source 1..18: mol_type = other DNA
taccaaggaacgtctggc

SEQ ID NO: 972 - DNA, 18 bp, synthetic construct
  misc_feature 1..18: note = Synthetic
  source 1..18: mol_type = other DNA
agtaccaaggaacgtctg

SEQ ID NO: 973 - DNA, 18 bp, synthetic construct
  misc_feature 1..18: note = Synthetic
  source 1..18: mol_type = other DNA
aaagtaccaaggaacgtc

SEQ ID NO: 974 - DNA, 18 bp, synthetic construct
  misc_feature 1..18: note = Synthetic
  source 1..18: mol_type = other DNA
gcaaagtaccaaggaacg

SEQ ID NO: 975 - DNA, 18 bp, synthetic construct
  misc_feature 1..18: note = Synthetic
  source 1..18: mol_type = other DNA
ctgcaaagtaccaaggaa

SEQ ID NO: 976 - DNA, 18 bp, synthetic construct
  misc_feature 1..18: note = Synthetic
  source 1..18: mol_type = other DNA
agctcaccagggtccaca

SEQ ID NO: 977 - DNA, 18 bp, synthetic construct
  misc_feature 1..18: note = Synthetic
  source 1..18: mol_type = other DNA
ccagctcaccagggtcca

SEQ ID NO: 978 - DNA, 18 bp, synthetic construct
  misc_feature 1..18: note = Synthetic
  source 1..18: mol_type = other DNA
acccagctcaccagggtc

SEQ ID NO: 979 - DNA, 18 bp, synthetic construct
  misc_feature 1..18: note = Synthetic
  source 1..18: mol_type = other DNA
ccacccagctcaccaggg

SEQ ID NO: 980 - DNA, 18 bp, synthetic construct
  misc_feature 1..18: note = Synthetic
  source 1..18: mol_type = other DNA
ggccacccagctcaccag

SEQ ID NO: 981 - DNA, 18 bp, synthetic construct
  misc_feature 1..18: note = Synthetic
  source 1..18: mol_type = other DNA
aaggccacccagctcacc

SEQ ID NO: 982 - DNA, 18 bp, synthetic construct
  misc_feature 1..18: note = Synthetic
  source 1..18: mol_type = other DNA
ttaaggccacccagctca

SEQ ID NO: 983 - DNA, 18 bp, synthetic construct
  misc_feature 1..18: note = Synthetic
  source 1..18: mol_type = other DNA
tgttaaggccacccagct

SEQ ID NO: 984 - DNA, 18 bp, synthetic construct
  misc_feature 1..18: note = Synthetic
  source 1..18: mol_type = other DNA
gctgttaaggccacccag

SEQ ID NO: 985 - DNA, 18 bp, synthetic construct
  misc_feature 1..18: note = Synthetic
  source 1..18: mol_type = other DNA
ctgctgttaaggccaccc

SEQ ID NO: 986 - DNA, 18 bp, synthetic construct
  misc_feature 1..18: note = Synthetic
  source 1..18: mol_type = other DNA
ccctgctgttaaggccac

SEQ ID NO: 987 - DNA, 18 bp, synthetic construct
  misc_feature 1..18: note = Synthetic
  source 1..18: mol_type = other DNA
agccctgctgttaaggcc

SEQ ID NO: 988 - DNA, 18 bp, synthetic construct
  misc_feature 1..18: note = Synthetic
  source 1..18: mol_type = other DNA
ccagccctgctgttaagg

SEQ ID NO: 989 - DNA, 18 bp, synthetic construct
  misc_feature 1..18: note = Synthetic
  source 1..18: mol_type = other DNA
caccagccctgctgttaa

SEQ ID NO: 990 - DNA, 18 bp, synthetic construct
  misc_feature 1..18: note = Synthetic
  source 1..18: mol_type = other DNA
gccaccagccctgctgtt

SEQ ID NO: 991 - DNA, 18 bp, synthetic construct
  misc_feature 1..18: note = Synthetic
  source 1..18: mol_type = other DNA
cagccaccagccctgctg

SEQ ID NO: 992 - DNA, 18 bp, synthetic construct
  misc_feature 1..18: note = Synthetic
  source 1..18: mol_type = other DNA
tccagccaccagccctgc

SEQ ID NO: 993 - DNA, 18 bp, synthetic construct
  misc_feature 1..18: note = Synthetic
  source 1..18: mol_type = other DNA
gttccagccaccagccct

SEQ ID NO: 994 - DNA, 18 bp, synthetic construct
  misc_feature 1..18: note = Synthetic
  source 1..18: mol_type = other DNA
gcgttccagccaccagcc

SEQ ID NO: 995 - DNA, 18 bp, synthetic construct
  misc_feature 1..18: note = Synthetic
  source 1..18: mol_type = other DNA
ccgcgttccagccaccag

SEQ ID NO: 996 - DNA, 18 bp, synthetic construct
  misc_feature 1..18: note = Synthetic
  source 1..18: mol_type = other DNA
caccgcgttccagccacc

SEQ ID NO: 997 - DNA, 18 bp, synthetic construct
  misc_feature 1..18: note = Synthetic
  source 1..18: mol_type = other DNA
ggcaccgcgttccagcca

SEQ ID NO: 998 - DNA, 18 bp, synthetic construct
  misc_feature 1..18: note = Synthetic
  source 1..18: mol_type = other DNA
tgggcaccgcgttccagc

SEQ ID NO: 999 - DNA, 18 bp, synthetic construct
  misc_feature 1..18: note = Synthetic
  source 1..18: mol_type = other DNA
tctgggcaccgcgttcca

SEQ ID NO: 1000 - DNA, 18 bp, synthetic construct
  misc_feature 1..18: note = Synthetic
  source 1..18: mol_type = other DNA
catctgggcaccgcgttc

SEQ ID NO: 1001 - DNA, 18 bp, synthetic construct
  misc_feature 1..18: note = Synthetic
  source 1..18: mol_type = other DNA
accatctgggcaccgcgt

SEQ ID NO: 1002 - DNA, 18 bp, synthetic construct
  misc_feature 1..18: note = Synthetic
  source 1..18: mol_type = other DNA
tgaccatctgggcaccgc

SEQ ID NO: 1003 - DNA, 18 bp, synthetic construct
  misc_feature 1..18: note = Synthetic
  source 1..18: mol_type = other DNA
actgaccatctgggcacc

SEQ ID NO: 1004 - DNA, 18 bp, synthetic construct
  misc_feature 1..18: note = Synthetic
  source 1..18: mol_type = other DNA
gaactgaccatctgggca

SEQ ID NO: 1005 - DNA, 18 bp, synthetic construct
  misc_feature 1..18: note = Synthetic
  source 1..18: mol_type = other DNA
cagaactgaccatctggg

SEQ ID NO: 1006 - DNA, 18 bp, synthetic construct
  misc_feature 1..18: note = Synthetic
  source 1..18: mol_type = other DNA
ggcagaactgaccatctg

SEQ ID NO: 1007 - DNA, 18 bp, synthetic construct
  misc_feature 1..18: note = Synthetic
  source 1..18: mol_type = other DNA
agggcagaactgaccatc

SEQ ID NO: 1008 - DNA, 18 bp, synthetic construct
  misc_feature 1..18: note = Synthetic
  source 1..18: mol_type = other DNA
acagggcagaactgacca

SEQ ID NO: 1009 - DNA, 18 bp, synthetic construct
  misc_feature 1..18: note = Synthetic
  source 1..18: mol_type = other DNA
ccacagggcagaactgac

SEQ ID NO: 1010 - DNA, 18 bp, synthetic construct
  misc_feature 1..18: note = Synthetic
  source 1..18: mol_type = other DNA
ggccacagggcagaactg

SEQ ID NO: 1011 - DNA, 18 bp, synthetic construct
  misc_feature 1..18: note = Synthetic
  source 1..18: mol_type = other DNA
caggccacagggcagaac

SEQ ID NO: 1012 - DNA, 18 bp, synthetic construct
  misc_feature 1..18: note = Synthetic
  source 1..18: mol_type = other DNA
agcaggccacagggcaga

SEQ ID NO: 1013 - DNA, 18 bp, synthetic construct
  misc_feature 1..18: note = Synthetic
  source 1..18: mol_type = other DNA
gcagcaggccacagggca

SEQ ID NO: 1014 - DNA, 18 bp, synthetic construct
  misc_feature 1..18: note = Synthetic
  source 1..18: mol_type = other DNA
aggcagcaggccacaggg

SEQ ID NO: 1015 - DNA, 18 bp, synthetic construct
  misc_feature 1..18: note = Synthetic
  source 1..18: mol_type = other DNA
ccaggcagcaggccacag

SEQ ID NO: 1016 - DNA, 18 bp, synthetic construct
  misc_feature 1..18: note = Synthetic
  source 1..18: mol_type = other DNA
gtccaggcagcaggccac

SEQ ID NO: 1017 - DNA, 18 bp, synthetic construct
  misc_feature 1..18: note = Synthetic
  source 1..18: mol_type = other DNA
gggtccaggcagcaggcc

SEQ ID NO: 1018 - DNA, 18 bp, synthetic construct
  misc_feature 1..18: note = Synthetic
  source 1..18: mol_type = other DNA
cggggtccaggcagcagg

SEQ ID NO: 1019 - DNA, 18 bp, synthetic construct
  misc_feature 1..18: note = Synthetic
  source 1..18: mol_type = other DNA
tccggggtccaggcagca

SEQ ID NO: 1020 - DNA, 18 bp, synthetic construct
  misc_feature 1..18: note = Synthetic
  source 1..18: mol_type = other DNA
cctccggggtccaggcag

SEQ ID NO: 1021 - DNA, 18 bp, synthetic construct
  misc_feature 1..18: note = Synthetic
  source 1..18: mol_type = other DNA
ctcctccggggtccaggc

SEQ ID NO: 1022 - DNA, 18 bp, synthetic construct
  misc_feature 1..18: note = Synthetic
  source 1..18: mol_type = other DNA
ggctcctccggggtccag

SEQ ID NO: 1023 - DNA, 18 bp, synthetic construct
  misc_feature 1..18: note = Synthetic
  source 1..18: mol_type = other DNA
ctggctcctccggggtcc

SEQ ID NO: 1024 - DNA, 18 bp, synthetic construct
  misc_feature 1..18: note = Synthetic
  source 1..18: mol_type = other DNA
agctggctcctccggggt

SEQ ID NO: 1025 - DNA, 18 bp, synthetic construct
  misc_feature 1..18: note = Synthetic
  source 1..18: mol_type = other DNA
gtagctggctcctccggg

SEQ ID NO: 1026 - DNA, 18 bp, synthetic construct
  misc_feature 1..18: note = Synthetic
  source 1..18: mol_type = other DNA
ctgtagctggctcctccg

SEQ ID NO: 1027 - DNA, 18 bp, synthetic construct
  misc_feature 1..18: note = Synthetic
  source 1..18: mol_type = other DNA
agctgtagctggctcctc

SEQ ID NO: 1028 - DNA, 18 bp, synthetic construct
  misc_feature 1..18: note = Synthetic
  source 1..18: mol_type = other DNA
gcagctgtagctggctcc

SEQ ID NO: 1029 - DNA, 18 bp, synthetic construct
  misc_feature 1..18: note = Synthetic
  source 1..18: mol_type = other DNA
cagcagctgtagctggct

SEQ ID NO: 1030 - DNA, 18 bp, synthetic construct
  misc_feature 1..18: note = Synthetic
  source 1..18: mol_type = other DNA
ggcagcagctgtagctgg

SEQ ID NO: 1031 - DNA, 18 bp, synthetic construct
  misc_feature 1..18: note = Synthetic
  source 1..18: mol_type = other DNA
acggcagcagctgtagct

SEQ ID NO: 1032 - DNA, 18 bp, synthetic construct
  misc_feature 1..18: note = Synthetic
  source 1..18: mol_type = other DNA
ggacggcagcagctgtag

SEQ ID NO: 1033 - DNA, 18 bp, synthetic construct
  misc_feature 1..18: note = Synthetic
  source 1..18: mol_type = other DNA
ggggacggcagcagctgt

SEQ ID NO: 1034 - DNA, 18 bp, synthetic construct
  misc_feature 1..18: note = Synthetic
  source 1..18: mol_type = other DNA
aaggggacggcagcagct

SEQ ID NO: 1035 - DNA, 18 bp, synthetic construct
  misc_feature 1..18: note = Synthetic
  source 1..18: mol_type = other DNA
agaaggggacggcagcag

SEQ ID NO: 1036 - DNA, 18 bp, synthetic construct
  misc_feature 1..18: note = Synthetic
  source 1..18: mol_type = other DNA
ccagaaggggacggcagc

SEQ ID NO: 1037 - DNA, 18 bp, synthetic construct
  misc_feature 1..18: note = Synthetic
  source 1..18: mol_type = other DNA
caccagaaggggacggca

SEQ ID NO: 1038 - DNA, 18 bp, synthetic construct
  misc_feature 1..18: note = Synthetic
  source 1..18: mol_type = other DNA
ctcaccagaaggggacgg

SEQ ID NO: 1039 - DNA, 18 bp, synthetic construct
  misc_feature 1..18: note = Synthetic
  source 1..18: mol_type = other DNA
cactcaccagaaggggac

SEQ ID NO: 1040 - DNA, 18 bp, synthetic construct
  misc_feature 1..18: note = Synthetic
  source 1..18: mol_type = other DNA
ggcactcaccagaagggg

SEQ ID NO: 1041 - DNA, 18 bp, synthetic construct
  misc_feature 1..18: note = Synthetic
  source 1..18: mol_type = other DNA
ggggcactcaccagaagg

SEQ ID NO: 1042 - DNA, 18 bp, synthetic construct
  misc_feature 1..18: note = Synthetic
  source 1..18: mol_type = other DNA
gaggggcactcaccagaa

SEQ ID NO: 1043 - DNA, 18 bp, synthetic construct
  misc_feature 1..18: note = Synthetic
  source 1..18: mol_type = other DNA
ctgaggggcactcaccag

SEQ ID NO: 1044 - DNA, 18 bp, synthetic construct
  misc_feature 1..18: note = Synthetic
  source 1..18: mol_type = other DNA
ggctgaggggcactcacc

SEQ ID NO: 1045 - DNA, 18 bp, synthetic construct
  misc_feature 1..18: note = Synthetic
  source 1..18: mol_type = other DNA
taggctgaggggcactca

SEQ ID NO: 1046 - DNA, 18 bp, synthetic construct
  misc_feature 1..18: note = Synthetic
  source 1..18: mol_type = other DNA
cctaggctgaggggcact

SEQ ID NO: 1047 - DNA, 18 bp, synthetic construct
  misc_feature 1..18: note = Synthetic
  source 1..18: mol_type = other DNA
tgcctaggctgaggggca

SEQ ID NO: 1048 - DNA, 18 bp, synthetic construct
  misc_feature 1..18: note = Synthetic
  source 1..18: mol_type = other DNA
cttgcctaggctgagggg

SEQ ID NO: 1049 - DNA, 18 bp, synthetic construct
  misc_feature 1..18: note = Synthetic
  source 1..18: mol_type = other DNA
ctcttgcctaggctgagg

SEQ ID NO: 1050 - DNA, 18 bp, synthetic construct
  misc_feature 1..18: note = Synthetic
  source 1..18: mol_type = other DNA
agctcttgcctaggctga

SEQ ID NO: 1051 - DNA, 18 bp, synthetic construct
  misc_feature 1..18: note = Synthetic
  source 1..18: mol_type = other DNA
ccagctcttgcctaggct

SEQ ID NO: 1052 - DNA, 18 bp, synthetic construct
  misc_feature 1..18: note = Synthetic
  source 1..18: mol_type = other DNA
tgccagctcttgcctagg

SEQ ID NO: 1053 - DNA, 18 bp, synthetic construct
  misc_feature 1..18: note = Synthetic
  source 1..18: mol_type = other DNA
gctgccagctcttgccta

SEQ ID NO: 1054 - DNA, 18 bp, synthetic construct
  misc_feature 1..18: note = Synthetic
  source 1..18: mol_type = other DNA
aggctgccagctcttgcc

SEQ ID NO: 1055 - DNA, 18 bp, synthetic construct
  misc_feature 1..18: note = Synthetic
  source 1..18: mol_type = other DNA
ccaggctgccagctcttg

SEQ ID NO: 1056 - DNA, 18 bp, synthetic construct
  misc_feature 1..18: note = Synthetic
  source 1..18: mol_type = other DNA
acccaggctgccagctct

SEQ ID NO: 1057 - DNA, 18 bp, synthetic construct
  misc_feature 1..18: note = Synthetic
  source 1..18: mol_type = other DNA
aaacccaggctgccagct

SEQ ID NO: 1058 - DNA, 18 bp, synthetic construct
  misc_feature 1..18: note = Synthetic
  source 1..18: mol_type = other DNA
gaaaacccaggctgccag

SEQ ID NO: 1059 - DNA, 18 bp, synthetic construct
  misc_feature 1..18: note = Synthetic
  source 1..18: mol_type = other DNA
gggaaaacccaggctgcc

SEQ ID NO: 1060 - DNA, 18 bp, synthetic construct
  misc_feature 1..18: note = Synthetic
  source 1..18: mol_type = other DNA
ttgggaaaacccaggctg

SEQ ID NO: 1061 - DNA, 18 bp, synthetic construct
  misc_feature 1..18: note = Synthetic
  source 1..18: mol_type = other DNA
ctttgggaaaacccaggc

SEQ ID NO: 1062 - DNA, 18 bp, synthetic construct
  misc_feature 1..18: note = Synthetic
  source 1..18: mol_type = other DNA
cttgtgcctggcgtcctc

SEQ ID NO: 1063 - DNA, 18 bp, synthetic construct
  misc_feature 1..18: note = Synthetic
  source 1..18: mol_type = other DNA
gacttgtgcctggcgtcc

SEQ ID NO: 1064 - DNA, 18 bp, synthetic construct
  misc_feature 1..18: note = Synthetic
  source 1..18: mol_type = other DNA
cagacttgtgcctggcgt

SEQ ID NO: 1065 - DNA, 18 bp, synthetic construct
  misc_feature 1..18: note = Synthetic
  source 1..18: mol_type = other DNA
cacagacttgtgcctggc

SEQ ID NO: 1066 - DNA, 18 bp, synthetic construct
  misc_feature 1..18: note = Synthetic
  source 1..18: mol_type = other DNA
accacagacttgtgcctg

SEQ ID NO: 1067 - DNA, 18 bp, synthetic construct
  misc_feature 1..18: note = Synthetic
  source 1..18: mol_type = other DNA
aaaccacagacttgtgcc

SEQ ID NO: 1068 - DNA, 18 bp, synthetic construct
  misc_feature 1..18: note = Synthetic
  source 1..18: mol_type = other DNA
ataaaccacagacttgtg

SEQ ID NO: 1069 - DNA, 18 bp, synthetic construct
  misc_feature 1..18: note = Synthetic
  source 1..18: mol_type = other DNA
tgataaaccacagacttg

SEQ ID NO: 1070 - DNA, 18 bp, synthetic construct
  misc_feature 1..18: note = Synthetic
  source 1..18: mol_type = other DNA
aatgataaaccacagact

SEQ ID NO: 1071 - DNA, 18 bp, synthetic construct
  misc_feature 1..18: note = Synthetic
  source 1..18: mol_type = other DNA
aaaatgataaaccacaga

SEQ ID NO: 1072 - DNA, 18 bp, synthetic construct
  misc_feature 1..18: note = Synthetic
  source 1..18: mol_type = other DNA
ggaaaatgataaaccaca

SEQ ID NO: 1073 - DNA, 18 bp, synthetic construct
  misc_feature 1..18: note = Synthetic
  source 1..18: mol_type = other DNA
agggaaaatgataaacca

SEQ ID NO: 1074 - DNA, 18 bp, synthetic construct
  misc_feature 1..18: note = Synthetic
  source 1..18: mol_type = other DNA
acagggaaaatgataaac

SEQ ID NO: 1075 - DNA, 18 bp, synthetic construct
  misc_feature 1..18: note = Synthetic
  source 1..18: mol_type = other DNA
agacagggaaaatgataa

SEQ ID NO: 1076 - DNA, 18 bp, synthetic construct
  misc_feature 1..18: note = Synthetic
  source 1..18: mol_type = other DNA
aaagacagggaaaatgat

SEQ ID NO: 1077 - DNA, 18 bp, synthetic construct
  misc_feature 1..18: note = Synthetic
  source 1..18: mol_type = other DNA
agaaagacagggaaaatg

SEQ ID NO: 1078 - DNA, 18 bp, synthetic construct
  misc_feature 1..18: note = Synthetic
  source 1..18: mol_type = other DNA
ctagaaagacagggaaaa

SEQ ID NO: 1079 - DNA, 18 bp, synthetic construct
  misc_feature 1..18: note = Synthetic
  source 1..18: mol_type = other DNA
tcctagaaagacagggaa

SEQ ID NO: 1080 - DNA, 18 bp, synthetic construct
  misc_feature 1..18: note = Synthetic
  source 1..18: mol_type = other DNA
tgtcctagaaagacaggg

SEQ ID NO: 1081 - DNA, 18 bp, synthetic construct
  misc_feature 1..18: note = Synthetic
  source 1..18: mol_type = other DNA
tttgtcctagaaagacag

SEQ ID NO: 1082 - DNA, 18 bp, synthetic construct
  misc_feature 1..18: note = Synthetic
  source 1..18: mol_type = other DNA
catttgtcctagaaagac

SEQ ID NO: 1083 - DNA, 18 bp, synthetic construct
  misc_feature 1..18: note = Synthetic
  source 1..18: mol_type = other DNA
gccatttgtcctagaaag

SEQ ID NO: 1084 - DNA, 18 bp, synthetic construct
  misc_feature 1..18: note = Synthetic
  source 1..18: mol_type = other DNA
gggccatttgtcctagaa

SEQ ID NO: 1085 - DNA, 18 bp, synthetic construct
  misc_feature 1..18: note = Synthetic
  source 1..18: mol_type = other DNA
gtgggccatttgtcctag

SEQ ID NO: 1086 - DNA, 18 bp, synthetic construct
  misc_feature 1..18: note = Synthetic
  source 1..18: mol_type = other DNA
ttgtgggccatttgtcct

SEQ ID NO: 1087 - DNA, 18 bp, synthetic construct
  misc_feature 1..18: note = Synthetic
  source 1..18: mol_type = other DNA
tgttgtgggccatttgtc

SEQ ID NO: 1088 - DNA, 18 bp, synthetic construct
  misc_feature 1..18: note = Synthetic
  source 1..18: mol_type = other DNA
agtgttgtgggccatttg

SEQ ID NO: 1089 - DNA, 18 bp, synthetic construct
  misc_feature 1..18: note = Synthetic
  source 1..18: mol_type = other DNA
tcagtgttgtgggccatt

SEQ ID NO: 1090 - DNA, 18 bp, synthetic construct
  misc_feature 1..18: note = Synthetic
  source 1..18: mol_type = other DNA
gctcagtgttgtgggcca

SEQ ID NO: 1091 - DNA, 18 bp, synthetic construct
  misc_feature 1..18: note = Synthetic
  source 1..18: mol_type = other DNA
ctgctcagtgttgtgggc

SEQ ID NO: 1092 - DNA, 18 bp, synthetic construct
  misc_feature 1..18: note = Synthetic
  source 1..18: mol_type = other DNA
gcctgctcagtgttgtgg

SEQ ID NO: 1093 - DNA, 18 bp, synthetic construct
  misc_feature 1..18: note = Synthetic
  source 1..18: mol_type = other DNA
atgcctgctcagtgttgt

SEQ ID NO: 1094 - DNA, 18 bp, synthetic construct
  misc_feature 1..18: note = Synthetic
  source 1..18: mol_type = other DNA
agatgcctgctcagtgtt

SEQ ID NO: 1095 - DNA, 18 bp, synthetic construct
  misc_feature 1..18: note = Synthetic
  source 1..18: mol_type = other DNA
ccagatgcctgctcagtg

SEQ ID NO: 1096 - DNA, 18 bp, synthetic construct
  misc_feature 1..18: note = Synthetic
  source 1..18: mol_type = other DNA
acccagatgcctgctcag

SEQ ID NO: 1097 - DNA, 18 bp, synthetic construct
  misc_feature 1..18: note = Synthetic
  source 1..18: mol_type = other DNA
ccacccagatgcctgctc

SEQ ID NO: 1098 - DNA, 18 bp, synthetic construct
  misc_feature 1..18: note = Synthetic
  source 1..18: mol_type = other DNA
ggccacccagatgcctgc

SEQ ID NO: 1099 - DNA, 18 bp, synthetic construct
  misc_feature 1..18: note = Synthetic
  source 1..18: mol_type = other DNA
ggggccacccagatgcct

SEQ ID NO: 1100 - DNA, 18 bp, synthetic construct
  misc_feature 1..18: note = Synthetic
  source 1..18: mol_type = other DNA
caggggccacccagatgc

SEQ ID NO: 1101 - DNA, 18 bp, synthetic construct
  misc_feature 1..18: note = Synthetic
  source 1..18: mol_type = other DNA
ggcaggggccacccagat

SEQ ID NO: 1102 - DNA, 18 bp, synthetic construct
  misc_feature 1..18: note = Synthetic
  source 1..18: mol_type = other DNA
ctggcaggggccacccag

SEQ ID NO: 1103 - DNA, 18 bp, synthetic construct
  misc_feature 1..18: note = Synthetic
  source 1..18: mol_type = other DNA
acctggcaggggccaccc

SEQ ID NO: 1104 - DNA, 18 bp, synthetic construct
  misc_feature 1..18: note = Synthetic
  source 1..18: mol_type = other DNA
caacctggcaggggccac

SEQ ID NO: 1105 - DNA, 18 bp, synthetic construct
  misc_feature 1..18: note = Synthetic
  source 1..18: mol_type = other DNA
atcaacctggcaggggcc

SEQ ID NO: 1106 - DNA, 18 bp, synthetic construct
  misc_feature 1..18: note = Synthetic
  source 1..18: mol_type = other DNA
gcatcaacctggcagggg

SEQ ID NO: 1107 - DNA, 18 bp, synthetic construct
  misc_feature 1..18: note = Synthetic
  source 1..18: mol_type = other DNA
gggcatcaacctggcagg

SEQ ID NO: 1108 - DNA, 18 bp, synthetic construct
  misc_feature 1..18: note = Synthetic
  source 1..18: mol_type = other DNA
gtgggcatcaacctggca

SEQ ID NO: 1109 - DNA, 18 bp, synthetic construct
  misc_feature 1..18: note = Synthetic
  source 1..18: mol_type = other DNA
cagtgggcatcaacctgg

SEQ ID NO: 1110 - DNA, 18 bp, synthetic construct
  misc_feature 1..18: note = Synthetic
  source 1..18: mol_type = other DNA
agcagtgggcatcaacct

SEQ ID NO: 1111 - DNA, 18 bp, synthetic construct
  misc_feature 1..18: note = Synthetic
  source 1..18: mol_type = other DNA
agagcagtgggcatcaac

SEQ ID NO: 1112 - DNA, 18 bp, synthetic construct
  misc_feature 1..18: note = Synthetic
  source 1..18: mol_type = other DNA
gcagagcagtgggcatca

SEQ ID NO: 1113 - DNA, 18 bp, synthetic construct
  misc_feature 1..18: note = Synthetic
  source 1..18: mol_type = other DNA
cggcagagcagtgggcat

SEQ ID NO: 1114 - DNA, 18 bp, synthetic construct
  misc_feature 1..18: note = Synthetic
  source 1..18: mol_type = other DNA
gccggcagagcagtgggc

SEQ ID NO: 1115 - DNA, 18 bp, synthetic construct
  misc_feature 1..18: note = Synthetic
  source 1..18: mol_type = other DNA
tggccggcagagcagtgg

SEQ ID NO: 1116 - DNA, 18 bp, synthetic construct
  misc_feature 1..18: note = Synthetic
  source 1..18: mol_type = other DNA
agtggccggcagagcagt

SEQ ID NO: 1117 - DNA, 18 bp, synthetic construct
  misc_feature 1..18: note = Synthetic
  source 1..18: mol_type = other DNA
ggagtggccggcagagca

SEQ ID NO: 1118 - DNA, 18 bp, synthetic construct
  misc_feature 1..18: note = Synthetic
  source 1..18: mol_type = other DNA
caggagtggccggcagag

SEQ ID NO: 1119 - DNA, 18 bp, synthetic construct
  misc_feature 1..18: note = Synthetic
  source 1..18: mol_type = other DNA
tgcaggagtggccggcag

SEQ ID NO: 1120 - DNA, 18 bp, synthetic construct
  misc_feature 1..18: note = Synthetic
  source 1..18: mol_type = other DNA
gatgcaggagtggccggc

SEQ ID NO: 1121 - DNA, 18 bp, synthetic construct
  misc_feature 1..18: note = Synthetic
  source 1..18: mol_type = other DNA
aagatgcaggagtggccg

SEQ ID NO: 1122 - DNA, 18 bp, synthetic construct
  misc_feature 1..18: note = Synthetic
  source 1..18: mol_type = other DNA
taaagatgcaggagtggc

SEQ ID NO: 1123 - DNA, 18 bp, synthetic construct
  misc_feature 1..18: note = Synthetic
  source 1..18: mol_type = other DNA
ggtaaagatgcaggagtg

SEQ ID NO: 1124 - DNA, 18 bp, synthetic construct
  misc_feature 1..18: note = Synthetic
  source 1..18: mol_type = other DNA
acggtaaagatgcaggag

SEQ ID NO: 1125 - DNA, 18 bp, synthetic construct
  misc_feature 1..18: note = Synthetic
  source 1..18: mol_type = other DNA
agacggtaaagatgcagg

SEQ ID NO: 1126 - DNA, 18 bp, synthetic construct
  misc_feature 1..18: note = Synthetic
  source 1..18: mol_type = other DNA
tgagacggtaaagatgca

SEQ ID NO: 1127 - DNA, 18 bp, synthetic construct
  misc_feature 1..18: note = Synthetic
  source 1..18: mol_type = other DNA
cctgagacggtaaagatg

SEQ ID NO: 1128 - DNA, 18 bp, synthetic construct
  misc_feature 1..18: note = Synthetic
  source 1..18: mol_type = other DNA
tccctgagacggtaaaga

SEQ ID NO: 1129 - DNA, 18 bp, synthetic construct
  misc_feature 1..18: note = Synthetic
  source 1..18: mol_type = other DNA
agtccctgagacggtaaa

SEQ ID NO: 1130 - DNA, 18 bp, synthetic construct
  misc_feature 1..18: note = Synthetic
  source 1..18: mol_type = other DNA
gaagtccctgagacggta

SEQ ID NO: 1131 - DNA, 18 bp, synthetic construct
  misc_feature 1..18: note = Synthetic
  source 1..18: mol_type = other DNA
tggaagtccctgagacgg

SEQ ID NO: 1132 - DNA, 18 bp, synthetic construct
  misc_feature 1..18: note = Synthetic
  source 1..18: mol_type = other DNA
actggaagtccctgagac

SEQ ID NO: 1133 - DNA, 18 bp, synthetic construct
  misc_feature 1..18: note = Synthetic
  source 1..18: mol_type = other DNA
caactggaagtccctgag

SEQ ID NO: 1134 - DNA, 18 bp, synthetic construct
  misc_feature 1..18: note = Synthetic
  source 1..18: mol_type = other DNA
agcaactggaagtccctg

SEQ ID NO: 1135 - DNA, 18 bp, synthetic construct
  misc_feature 1..18: note = Synthetic
  source 1..18: mol_type = other DNA
gcagcaactggaagtccc

SEQ ID NO: 1136 - DNA, 18 bp, synthetic construct
  misc_feature 1..18: note = Synthetic
  source 1..18: mol_type = other DNA
gggcagcaactggaagtc

SEQ ID NO: 1137 - DNA, 18 bp, synthetic construct
  misc_feature 1..18: note = Synthetic
  source 1..18: mol_type = other DNA
aggggcagcaactggaag

SEQ ID NO: 1138 - DNA, 18 bp, synthetic construct
  misc_feature 1..18: note = Synthetic
  source 1..18: mol_type = other DNA
gaaggggcagcaactgga

SEQ ID NO: 1139 - DNA, 18 bp, synthetic construct
  misc_feature 1..18: note = Synthetic
  source 1..18: mol_type = other DNA
gggaaggggcagcaactg

SEQ ID NO: 1140 - DNA, 18 bp, synthetic construct
  misc_feature 1..18: note = Synthetic
  source 1..18: mol_type = other DNA
ctgggaaggggcagcaac

SEQ ID NO: 1141 - DNA, 18 bp, synthetic construct
  misc_feature 1..18: note = Synthetic
  source 1..18: mol_type = other DNA
ctctgggaaggggcagca

SEQ ID NO: 1142 - DNA, 18 bp, synthetic construct
  misc_feature 1..18: note = Synthetic
  source 1..18: mol_type = other DNA
acctctgggaaggggcag

SEQ ID NO: 1143 - DNA, 18 bp, synthetic construct
  misc_feature 1..18: note = Synthetic
  source 1..18: mol_type = other DNA
tcacctctgggaaggggc

SEQ ID NO: 1144 - DNA, 18 bp, synthetic construct
  misc_feature 1..18: note = Synthetic
  source 1..18: mol_type = other DNA
gctcacctctgggaaggg

SEQ ID NO: 1145 - DNA, 18 bp, synthetic construct
  misc_feature 1..18: note = Synthetic
  source 1..18: mol_type = other DNA
acgctcacctctgggaag

SEQ ID NO: 1146 - DNA, 18 bp, synthetic construct
  misc_feature 1..18: note = Synthetic
  source 1..18: mol_type = other DNA
gcacgctcacctctggga

SEQ ID NO: 1147 - DNA, 18 bp, synthetic construct
  misc_feature 1..18: note = Synthetic
  source 1..18: mol_type = other DNA
tggcacgctcacctctgg

SEQ ID NO: 1148 - DNA, 18 bp, synthetic construct
  misc_feature 1..18: note = Synthetic
  source 1..18: mol_type = other DNA
gatggcacgctcacctct

SEQ ID NO: 1149 - DNA, 18 bp, synthetic construct
  misc_feature 1..18: note = Synthetic
  source 1..18: mol_type = other DNA
ctgatggcacgctcacct

SEQ ID NO: 1150 - DNA, 18 bp, synthetic construct
  misc_feature 1..18: note = Synthetic
  source 1..18: mol_type = other DNA
ggctgatggcacgctcac

SEQ ID NO: 1151 - DNA, 18 bp, synthetic construct
  misc_feature 1..18: note = Synthetic
  source 1..18: mol_type = other DNA
tgggctgatggcacgctc

SEQ ID NO: 1152 - DNA, 18 bp, synthetic construct
  misc_feature 1..18: note = Synthetic
  source 1..18: mol_type = other DNA
actgggctgatggcacgc

SEQ ID NO: 1153 - DNA, 18 bp, synthetic construct
  misc_feature 1..18: note = Synthetic
  source 1..18: mol_type = other DNA
ccactgggctgatggcac

SEQ ID NO: 1154 - DNA, 18 bp, synthetic construct
  misc_feature 1..18: note = Synthetic
  source 1..18: mol_type = other DNA
ctccactgggctgatggc

SEQ ID NO: 1155 - DNA, 18 bp, synthetic construct
  misc_feature 1..18: note = Synthetic
  source 1..18: mol_type = other DNA
ccctccactgggctgatg

SEQ ID NO: 1156 - DNA, 18 bp, synthetic construct
  misc_feature 1..18: note = Synthetic
  source 1..18: mol_type = other DNA
gcccctccactgggctga

SEQ ID NO: 1157 - DNA, 18 bp, synthetic construct
  misc_feature 1..18: note = Synthetic
  source 1..18: mol_type = other DNA
aagcccctccactgggct

SEQ ID NO: 1158 - DNA, 18 bp, synthetic construct
  misc_feature 1..18: note = Synthetic
  source 1..18: mol_type = other DNA
ctaagcccctccactggg

SEQ ID NO: 1159 - DNA, 18 bp, synthetic construct
  misc_feature 1..18: note = Synthetic
  source 1..18: mol_type = other DNA
acctaagcccctccactg

SEQ ID NO: 1160 - DNA, 18 bp, synthetic construct
  misc_feature 1..18: note = Synthetic
  source 1..18: mol_type = other DNA
agacctaagcccctccac

SEQ ID NO: 1161 - DNA, 18 bp, synthetic construct
  misc_feature 1..18: note = Synthetic
  source 1..18: mol_type = other DNA
gcagacctaagcccctcc

SEQ ID NO: 1162 - DNA, 18 bp, synthetic construct
  misc_feature 1..18: note = Synthetic
  source 1..18: mol_type = other DNA
atgcagacctaagcccct

SEQ ID NO: 1163 - DNA, 18 bp, synthetic construct
  misc_feature 1..18: note = Synthetic
  source 1..18: mol_type = other DNA
aaatgcagacctaagccc

SEQ ID NO: 1164 - DNA, 18 bp, synthetic construct
  misc_feature 1..18: note = Synthetic
  source 1..18: mol_type = other DNA
ataaatgcagacctaagc

SEQ ID NO: 1165 - DNA, 18 bp, synthetic construct
  misc_feature 1..18: note = Synthetic
  source 1..18: mol_type = other DNA
gcataaatgcagacctaa

SEQ ID NO: 1166 - DNA, 18 bp, synthetic construct
  misc_feature 1..18: note = Synthetic
  source 1..18: mol_type = other DNA
aagcataaatgcagacct

SEQ ID NO: 1167 - DNA, 18 bp, synthetic construct
  misc_feature 1..18: note = Synthetic
  source 1..18: mol_type = other DNA
cccttttatctgcaggtg

SEQ ID NO: 1168 - DNA, 18 bp, synthetic construct
  misc_feature 1..18: note = Synthetic
  source 1..18: mol_type = other DNA
ggcccttttatctgcagg

SEQ ID NO: 1169 - DNA, 18 bp, synthetic construct
  misc_feature 1..18: note = Synthetic
  source 1..18: mol_type = other DNA
agggcccttttatctgca

SEQ ID NO: 1170 - DNA, 18 bp, synthetic construct
  misc_feature 1..18: note = Synthetic
  source 1..18: mol_type = other DNA
gcagggcccttttatctg

SEQ ID NO: 1171 - DNA, 18 bp, synthetic construct
  misc_feature 1..18: note = Synthetic
  source 1..18: mol_type = other DNA
tggcagggcccttttatc

SEQ ID NO: 1172 - DNA, 18 bp, synthetic construct
  misc_feature 1..18: note = Synthetic
  source 1..18: mol_type = other DNA
attggcagggccctttta

SEQ ID NO: 1173 - DNA, 18 bp, synthetic construct
  misc_feature 1..18: note = Synthetic
  source 1..18: mol_type = other DNA
gcattggcagggcccttt

SEQ ID NO: 1174 - DNA, 18 bp, synthetic construct
  misc_feature 1..18: note = Synthetic
  source 1..18: mol_type = other DNA
ctgcattggcagggccct

SEQ ID NO: 1175 - DNA, 18 bp, synthetic construct
  misc_feature 1..18: note = Synthetic
  source 1..18: mol_type = other DNA
acctgcattggcagggcc

SEQ ID NO: 1176 - DNA, 18 bp, synthetic construct
  misc_feature 1..18: note = Synthetic
  source 1..18: mol_type = other DNA
aaacctgcattggcaggg

SEQ ID NO: 1177 - DNA, 18 bp, synthetic construct
  misc_feature 1..18: note = Synthetic
  source 1..18: mol_type = other DNA
agaaacctgcattggcag

SEQ ID NO: 1178 - DNA, 18 bp, synthetic construct
  misc_feature 1..18: note = Synthetic
  source 1..18: mol_type = other DNA
agagaaacctgcattggc

SEQ ID NO: 1179 - DNA, 18 bp, synthetic construct
  misc_feature 1..18: note = Synthetic
  source 1..18: mol_type = other DNA
acagagaaacctgcattg

SEQ ID NO: 1180 - DNA, 18 bp, synthetic construct
  misc_feature 1..18: note = Synthetic
  source 1..18: mol_type = other DNA
acacagagaaacctgcat

SEQ ID NO: 1181 - DNA, 18 bp, synthetic construct
  misc_feature 1..18: note = Synthetic
  source 1..18: mol_type = other DNA
gaacacagagaaacctgc

SEQ ID NO: 1182 - DNA, 18 bp, synthetic construct
  misc_feature 1..18: note = Synthetic
  source 1..18: mol_type = other DNA
tggaacacagagaaacct

SEQ ID NO: 1183 - DNA, 18 bp, synthetic construct
  misc_feature 1..18: note = Synthetic
  source 1..18: mol_type = other DNA
tgtggaacacagagaaac

SEQ ID NO: 1184 - DNA, 18 bp, synthetic construct
  misc_feature 1..18: note = Synthetic
  source 1..18: mol_type = other DNA
cctgtggaacacagagaa

SEQ ID NO: 1185 - DNA, 18 bp, synthetic construct
  misc_feature 1..18: note = Synthetic
  source 1..18: mol_type = other DNA
ggcctgtggaacacagag

SEQ ID NO: 1186 - DNA, 18 bp, synthetic construct
  misc_feature 1..18: note = Synthetic
  source 1..18: mol_type = other DNA
acggcctgtggaacacag

SEQ ID NO: 1187 - DNA, 18 bp, synthetic construct
  misc_feature 1..18: note = Synthetic
  source 1..18: mol_type = other DNA
ccacggcctgtggaacac

SEQ ID NO: 1188 - DNA, 18 bp, synthetic construct
  misc_feature 1..18: note = Synthetic
  source 1..18: mol_type = other DNA
tgccacggcctgtggaac

SEQ ID NO: 1189 - DNA, 18 bp, synthetic construct
  misc_feature 1..18: note = Synthetic
  source 1..18: mol_type = other DNA
catgccacggcctgtgga

SEQ ID NO: 1190 - DNA, 18 bp, synthetic construct
  misc_feature 1..18: note = Synthetic
  source 1..18: mol_type = other DNA
cgcatgccacggcctgtg

SEQ ID NO: 1191 - DNA, 18 bp, synthetic construct
  misc_feature 1..18: note = Synthetic
  source 1..18: mol_type = other DNA
cccgcatgccacggcctg

SEQ ID NO: 1192 - DNA, 18 bp, synthetic construct
  misc_feature 1..18: note = Synthetic
  source 1..18: mol_type = other DNA
tccccgcatgccacggcc

SEQ ID NO: 1193 - DNA, 18 bp, synthetic construct
  misc_feature 1..18: note = Synthetic
  source 1..18: mol_type = other DNA
catccccgcatgccacgg

SEQ ID NO: 1194 - DNA, 18 bp, synthetic construct
  misc_feature 1..18: note = Synthetic
  source 1..18: mol_type = other DNA
gccatccccgcatgccac

SEQ ID NO: 1195 - DNA, 18 bp, synthetic construct
  misc_feature 1..18: note = Synthetic
  source 1..18: mol_type = other DNA
tggccatccccgcatgcc

SEQ ID NO: 1196 - DNA, 18 bp, synthetic construct
  misc_feature 1..18: note = Synthetic
  source 1..18: mol_type = other DNA
gatggccatccccgcatg

SEQ ID NO: 1197 - DNA, 18 bp, synthetic construct
  misc_feature 1..18: note = Synthetic
  source 1..18: mol_type = other DNA
gtgatggccatccccgca

SEQ ID NO: 1198 - DNA, 18 bp, synthetic construct
  misc_feature 1..18: note = Synthetic
  source 1..18: mol_type = other DNA
cagtgatggccatccccg

SEQ ID NO: 1199 - DNA, 18 bp, synthetic construct
  misc_feature 1..18: note = Synthetic
  source 1..18: mol_type = other DNA
agcagtgatggccatccc

SEQ ID NO: 1200 - DNA, 18 bp, synthetic construct
  misc_feature 1..18: note = Synthetic
  source 1..18: mol_type = other DNA
gcagcagtgatggccatc

SEQ ID NO: 1201 - DNA, 18 bp, synthetic construct
  misc_feature 1..18: note = Synthetic
  source 1..18: mol_type = other DNA
gggcagcagtgatggcca

SEQ ID NO: 1202 - DNA, 18 bp, synthetic construct
  misc_feature 1..18: note = Synthetic
  source 1..18: mol_type = other DNA
gtgggcagcagtgatggc

SEQ ID NO: 1203 - DNA, 18 bp, synthetic construct
  misc_feature 1..18: note = Synthetic
  source 1..18: mol_type = other DNA
ccgtgggcagcagtgatg

SEQ ID NO: 1204 - DNA, 18 bp, synthetic construct
  misc_feature 1..18: note = Synthetic
  source 1..18: mol_type = other DNA
ccccgtgggcagcagtga

SEQ ID NO: 1205 - DNA, 18 bp, synthetic construct
  misc_feature 1..18: note = Synthetic
  source 1..18: mol_type = other DNA
agccccgtgggcagcagt

SEQ ID NO: 1206 - DNA, 18 bp, synthetic construct
  misc_feature 1..18: note = Synthetic
  source 1..18: mol_type = other DNA
gaagccccgtgggcagca

SEQ ID NO: 1207 - DNA, 18 bp, synthetic construct
  misc_feature 1..18: note = Synthetic
  source 1..18: mol_type = other DNA
tggaagccccgtgggcag

SEQ ID NO: 1208 - DNA, 18 bp, synthetic construct
  misc_feature 1..18: note = Synthetic
  source 1..18: mol_type = other DNA
agtggaagccccgtgggc

SEQ ID NO: 1209 - DNA, 18 bp, synthetic construct
  misc_feature 1..18: note = Synthetic
  source 1..18: mol_type = other DNA
gcagtggaagccccgtgg

SEQ ID NO: 1210 - DNA, 18 bp, synthetic construct
  misc_feature 1..18: note = Synthetic
  source 1..18: mol_type = other DNA
ctgcagtggaagccccgt

SEQ ID NO: 1211 - DNA, 18 bp, synthetic construct
  misc_feature 1..18: note = Synthetic
  source 1..18: mol_type = other DNA
cactgcagtggaagcccc

SEQ ID NO: 1212 - DNA, 18 bp, synthetic construct
  misc_feature 1..18: note = Synthetic
  source 1..18: mol_type = other DNA
tgcactgcagtggaagcc

SEQ ID NO: 1213 - DNA, 18 bp, synthetic construct
  misc_feature 1..18: note = Synthetic
  source 1..18: mol_type = other DNA
tctgcactgcagtggaag

SEQ ID NO: 1214 - DNA, 18 bp, synthetic construct
  misc_feature 1..18: note = Synthetic
  source 1..18: mol_type = other DNA
cgtctgcactgcagtgga

SEQ ID NO: 1215 - DNA, 18 bp, synthetic construct
  misc_feature 1..18: note = Synthetic
  source 1..18: mol_type = other DNA
cccgtctgcactgcagtg

SEQ ID NO: 1216 - DNA, 18 bp, synthetic construct
  misc_feature 1..18: note = Synthetic
  source 1..18: mol_type = other DNA
cgcccgtctgcactgcag

SEQ ID NO: 1217 - DNA, 18 bp, synthetic construct
  misc_feature 1..18: note = Synthetic
  source 1..18: mol_type = other DNA
atcgcccgtctgcactgc

SEQ ID NO: 1218 - DNA, 18 bp, synthetic construct
  misc_feature 1..18: note = Synthetic
  source 1..18: mol_type = other DNA
ggatcgcccgtctgcact

SEQ ID NO: 1219 - DNA, 18 bp, synthetic construct
  misc_feature 1..18: note = Synthetic
  source 1..18: mol_type = other DNA
caggatcgcccgtctgca

SEQ ID NO: 1220 - DNA, 18 bp, synthetic construct
  misc_feature 1..18: note = Synthetic
  source 1..18: mol_type = other DNA
agcaggatcgcccgtctg

SEQ ID NO: 1221 - DNA, 18 bp, synthetic construct
  misc_feature 1..18: note = Synthetic
  source 1..18: mol_type = other DNA
gaagcaggatcgcccgtc

SEQ ID NO: 1222 - DNA, 18 bp, synthetic construct
  misc_feature 1..18: note = Synthetic
  source 1..18: mol_type = other DNA
tggaagcaggatcgcccg

SEQ ID NO: 1223 - DNA, 18 bp, synthetic construct
  misc_feature 1..18: note = Synthetic
  source 1..18: mol_type = other DNA
tttggaagcaggatcgcc

SEQ ID NO: 1224 - DNA, 18 bp, synthetic construct
  misc_feature 1..18: note = Synthetic
  source 1..18: mol_type = other DNA
tctttggaagcaggatcg

SEQ ID NO: 1225 - DNA, 18 bp, synthetic construct
  misc_feature 1..18: note = Synthetic
  source 1..18: mol_type = other DNA
gatctttggaagcaggat

SEQ ID NO: 1226 - DNA, 18 bp, synthetic construct
  misc_feature 1..18: note = Synthetic
  source 1..18: mol_type = other DNA
ctgatctttggaagcagg

SEQ ID NO: 1227 - DNA, 18 bp, synthetic construct
  misc_feature 1..18: note = Synthetic
  source 1..18: mol_type = other DNA
acccacaccccagctgca

SEQ ID NO: 1228 - DNA, 18 bp, synthetic construct
  misc_feature 1..18: note = Synthetic
  source 1..18: mol_type = other DNA
gcacccacaccccagctg

SEQ ID NO: 1229 - DNA, 18 bp, synthetic construct
  misc_feature 1..18: note = Synthetic
  source 1..18: mol_type = other DNA
ctgcacccacaccccagc

SEQ ID NO: 1230 - DNA, 18 bp, synthetic construct
  misc_feature 1..18: note = Synthetic
  source 1..18: mol_type = other DNA
ccctgcacccacacccca

SEQ ID NO: 1231 - DNA, 18 bp, synthetic construct
  misc_feature 1..18: note = Synthetic
  source 1..18: mol_type = other DNA
tgccctgcacccacaccc

SEQ ID NO: 1232 - DNA, 18 bp, synthetic construct
  misc_feature 1..18: note = Synthetic
  source 1..18: mol_type = other DNA
cctgccctgcacccacac

SEQ ID NO: 1233 - DNA, 18 bp, synthetic construct
  misc_feature 1..18: note = Synthetic
  source 1..18: mol_type = other DNA
tgcctgccctgcacccac

SEQ ID NO: 1234 - DNA, 18 bp, synthetic construct
  misc_feature 1..18: note = Synthetic
  source 1..18: mol_type = other DNA
tctgcctgccctgcaccc

SEQ ID NO: 1235 - DNA, 18 bp, synthetic construct
  misc_feature 1..18: note = Synthetic
  source 1..18: mol_type = other DNA
cgtctgcctgccctgcac

SEQ ID NO: 1236 - DNA, 18 bp, synthetic construct
  misc_feature 1..18: note = Synthetic
  source 1..18: mol_type = other DNA
cccgtctgcctgccctgc

SEQ ID NO: 1237 - DNA, 18 bp, synthetic construct
  misc_feature 1..18: note = Synthetic
  source 1..18: mol_type = other DNA
tgcccgtctgcctgccct

SEQ ID NO: 1238 - DNA, 18 bp, synthetic construct
  misc_feature 1..18: note = Synthetic
  source 1..18: mol_type = other DNA
gctgcccgtctgcctgcc

SEQ ID NO: 1239 - DNA, 18 bp, synthetic construct
  misc_feature 1..18: note = Synthetic
  source 1..18: mol_type = other DNA
atgctgcccgtctgcctg

SEQ ID NO: 1240 - DNA, 18 bp, synthetic construct
  misc_feature 1..18: note = Synthetic
  source 1..18: mol_type = other DNA
ccacatgctgcccgtctg

SEQ ID NO: 1241 - DNA, 18 bp, synthetic construct
  misc_feature 1..18: note = Synthetic
  source 1..18: mol_type = other DNA
ctccacatgctgcccgtc

SEQ ID NO: 1242 - DNA, 18 bp, synthetic construct
  misc_feature 1..18: note = Synthetic
  source 1..18: mol_type = other DNA
gactccacatgctgcccg

SEQ ID NO: 1243 - DNA, 18 bp, synthetic construct
  misc_feature 1..18: note = Synthetic
  source 1..18: mol_type = other DNA
ccactcagggaaggtgac

SEQ ID NO: 1244 - DNA, 18 bp, synthetic construct
  misc_feature 1..18: note = Synthetic
  source 1..18: mol_type = other DNA
gcccactcagggaaggtg

SEQ ID NO: 1245 - DNA, 18 bp, synthetic construct
  misc_feature 1..18: note = Synthetic
  source 1..18: mol_type = other DNA
cagcccactcagggaagg

SEQ ID NO: 1246 - DNA, 18 bp, synthetic construct
  misc_feature 1..18: note = Synthetic
  source 1..18: mol_type = other DNA
accagcccactcagggaa

SEQ ID NO: 1247 - DNA, 18 bp, synthetic construct
  misc_feature 1..18: note = Synthetic
  source 1..18: mol_type = other DNA
ctaccagcccactcaggg

SEQ ID NO: 1248 - DNA, 18 bp, synthetic construct
  misc_feature 1..18: note = Synthetic
  source 1..18: mol_type = other DNA
tactaccagcccactcag

SEQ ID NO: 1249 - DNA, 18 bp, synthetic construct
  misc_feature 1..18: note = Synthetic
  source 1..18: mol_type = other DNA
gatactaccagcccactc

SEQ ID NO: 1250 - DNA, 18 bp, synthetic construct
  misc_feature 1..18: note = Synthetic
  source 1..18: mol_type = other DNA
aggatactaccagcccac

SEQ ID NO: 1251 - DNA, 18 bp, synthetic construct
  misc_feature 1..18: note = Synthetic
  source 1..18: mol_type = other DNA
ccaggatactaccagccc

SEQ ID NO: 1252 - DNA, 18 bp, synthetic construct
  misc_feature 1..18: note = Synthetic
  source 1..18: mol_type = other DNA
acccaggatactaccagc

SEQ ID NO: 1253 - DNA, 18 bp, synthetic construct
  misc_feature 1..18: note = Synthetic
  source 1..18: mol_type = other DNA
tgacccaggatactacca

SEQ ID NO: 1254 - DNA, 18 bp, synthetic construct
  misc_feature 1..18: note = Synthetic
  source 1..18: mol_type = other DNA
gatgacccaggatactac

SEQ ID NO: 1255 - DNA, 18 bp, synthetic construct
  misc_feature 1..18: note = Synthetic
  source 1..18: mol_type = other DNA
aagatgacccaggatact

SEQ ID NO: 1256 - DNA, 18 bp, synthetic construct
  misc_feature 1..18: note = Synthetic
  source 1..18: mol_type = other DNA
acaagatgacccaggata

SEQ ID NO: 1257 - DNA, 18 bp, synthetic construct
  misc_feature 1..18: note = Synthetic
  source 1..18: mol_type = other DNA
ggacaagatgacccagga

SEQ ID NO: 1258 - DNA, 18 bp, synthetic construct
  misc_feature 1..18: note = Synthetic
  source 1..18: mol_type = other DNA
gtggacaagatgacccag

SEQ ID NO: 1259 - DNA, 18 bp, synthetic construct
  misc_feature 1..18: note = Synthetic
  source 1..18: mol_type = other DNA
ctgtggacaagatgaccc

SEQ ID NO: 1260 - DNA, 18 bp, synthetic construct
  misc_feature 1..18: note = Synthetic
  source 1..18: mol_type = other DNA
acctgtggacaagatgac

SEQ ID NO: 1261 - DNA, 18 bp, synthetic construct
  misc_feature 1..18: note = Synthetic
  source 1..18: mol_type = other DNA
ttacctgtggacaagatg

SEQ ID NO: 1262 - DNA, 18 bp, synthetic construct
  misc_feature 1..18: note = Synthetic
  source 1..18: mol_type = other DNA
tgttacctgtggacaaga

SEQ ID NO: 1263 - DNA, 18 bp, synthetic construct
  misc_feature 1..18: note = Synthetic
  source 1..18: mol_type = other DNA
gttgttacctgtggacaa

SEQ ID NO: 1264 - DNA, 18 bp, synthetic construct
  misc_feature 1..18: note = Synthetic
  source 1..18: mol_type = other DNA
gagttgttacctgtggac

SEQ ID NO: 1265 - DNA, 18 bp, synthetic construct
  misc_feature 1..18: note = Synthetic
  source 1..18: mol_type = other DNA
cggagttgttacctgtgg

SEQ ID NO: 1266 - DNA, 18 bp, synthetic construct
  misc_feature 1..18: note = Synthetic
  source 1..18: mol_type = other DNA
cacggagttgttacctgt

SEQ ID NO: 1267 - DNA, 18 bp, synthetic construct
  misc_feature 1..18: note = Synthetic
  source 1..18: mol_type = other DNA
cccacggagttgttacct

SEQ ID NO: 1268 - DNA, 18 bp, synthetic construct
  misc_feature 1..18: note = Synthetic
  source 1..18: mol_type = other DNA
cacccacggagttgttac

SEQ ID NO: 1269 - DNA, 18 bp, synthetic construct
  misc_feature 1..18: note = Synthetic
  source 1..18: mol_type = other DNA
ggcacccacggagttgtt

SEQ ID NO: 1270 - DNA, 18 bp, synthetic construct
  misc_feature 1..18: note = Synthetic
  source 1..18: mol_type = other DNA
atggcacccacggagttg

SEQ ID NO: 1271 - DNA, 18 bp, synthetic construct
  misc_feature 1..18: note = Synthetic
  source 1..18: mol_type = other DNA
ggatggcacccacggagt

SEQ ID NO: 1272 - DNA, 18 bp, synthetic construct
  misc_feature 1..18: note = Synthetic
  source 1..18: mol_type = other DNA
ctggatggcacccacgga

SEQ ID NO: 1273 - DNA, 18 bp, synthetic construct
  misc_feature 1..18: note = Synthetic
  source 1..18: mol_type = other DNA
cactggatggcacccacg

SEQ ID NO: 1274 - DNA, 18 bp, synthetic construct
  misc_feature 1..18: note = Synthetic
  source 1..18: mol_type = other DNA
ggcactggatggcaccca

SEQ ID NO: 1275 - DNA, 18 bp, synthetic construct
  misc_feature 1..18: note = Synthetic
  source 1..18: mol_type = other DNA
agggcactggatggcacc

SEQ ID NO: 1276 - DNA, 18 bp, synthetic construct
  misc_feature 1..18: note = Synthetic
  source 1..18: mol_type = other DNA
tcagggcactggatggca

SEQ ID NO: 1277 - DNA, 18 bp, synthetic construct
  misc_feature 1..18: note = Synthetic
  source 1..18: mol_type = other DNA
tatcagggcactggatgg

SEQ ID NO: 1278 - DNA, 18 bp, synthetic construct
  misc_feature 1..18: note = Synthetic
  source 1..18: mol_type = other DNA
actatcagggcactggat

SEQ ID NO: 1279 - DNA, 18 bp, synthetic construct
  misc_feature 1..18: note = Synthetic
  source 1..18: mol_type = other DNA
tgactatcagggcactgg

SEQ ID NO: 1280 - DNA, 18 bp, synthetic construct
  misc_feature 1..18: note = Synthetic
  source 1..18: mol_type = other DNA
actgactatcagggcact

SEQ ID NO: 1281 - DNA, 18 bp, synthetic construct
  misc_feature 1..18: note = Synthetic
  source 1..18: mol_type = other DNA
gaactgactatcagggca

SEQ ID NO: 1282 - DNA, 18 bp, synthetic construct
  misc_feature 1..18: note = Synthetic
  source 1..18: mol_type = other DNA
tcgaactgactatcaggg

SEQ ID NO: 1283 - DNA, 18 bp, synthetic construct
  misc_feature 1..18: note = Synthetic
  source 1..18: mol_type = other DNA
attcgaactgactatcag

SEQ ID NO: 1284 - DNA, 18 bp, synthetic construct
  misc_feature 1..18: note = Synthetic
  source 1..18: mol_type = other DNA
gcattcgaactgactatc

SEQ ID NO: 1285 - DNA, 18 bp, synthetic construct
  misc_feature 1..18: note = Synthetic
  source 1..18: mol_type = other DNA
gggcattcgaactgacta

SEQ ID NO: 1286 - DNA, 18 bp, synthetic construct
  misc_feature 1..18: note = Synthetic
  source 1..18: mol_type = other DNA
ccgggcattcgaactgac

SEQ ID NO: 1287 - DNA, 18 bp, synthetic construct
  misc_feature 1..18: note = Synthetic
  source 1..18: mol_type = other DNA
gtccgggcattcgaactg

SEQ ID NO: 1288 - DNA, 18 bp, synthetic construct
  misc_feature 1..18: note = Synthetic
  source 1..18: mol_type = other DNA
aagtccgggcattcgaac

SEQ ID NO: 1289 - DNA, 18 bp, synthetic construct
  misc_feature 1..18: note = Synthetic
  source 1..18: mol_type = other DNA
agaagtccgggcattcga

SEQ ID NO: 1290 - DNA, 18 bp, synthetic construct
  misc_feature 1..18: note = Synthetic
  source 1..18: mol_type = other DNA
ggagaagtccgggcattc

SEQ ID NO: 1291 - DNA, 18 bp, synthetic construct
  misc_feature 1..18: note = Synthetic
  source 1..18: mol_type = other DNA
gtggagaagtccgggcat

SEQ ID NO: 1292 - DNA, 18 bp, synthetic construct
  misc_feature 1..18: note = Synthetic
  source 1..18: mol_type = other DNA
acgtggagaagtccgggc

SEQ ID NO: 1293 - DNA, 18 bp, synthetic construct
  misc_feature 1..18: note = Synthetic
  source 1..18: mol_type = other DNA
gcacgtggagaagtccgg

SEQ ID NO: 1294 - DNA, 18 bp, synthetic construct
  misc_feature 1..18: note = Synthetic
  source 1..18: mol_type = other DNA
cagcacgtggagaagtcc

SEQ ID NO: 1295 - DNA, 18 bp, synthetic construct
  misc_feature 1..18: note = Synthetic
  source 1..18: mol_type = other DNA
cacagcacgtggagaagt

SEQ ID NO: 1296 - DNA, 18 bp, synthetic construct
  misc_feature 1..18: note = Synthetic
  source 1..18: mol_type = other DNA
aacacagcacgtggagaa

SEQ ID NO: 1297 - DNA, 18 bp, synthetic construct
  misc_feature 1..18: note = Synthetic
  source 1..18: mol_type = other DNA
ataacacagcacgtggag

SEQ ID NO: 1298 - DNA, 18 bp, synthetic construct
  misc_feature 1..18: note = Synthetic
  source 1..18: mol_type = other DNA
ccataacacagcacgtgg

SEQ ID NO: 1299 - DNA, 18 bp, synthetic construct
  misc_feature 1..18: note = Synthetic
  source 1..18: mol_type = other DNA
gaccataacacagcacgt

SEQ ID NO: 1300 - DNA, 18 bp, synthetic construct
  misc_feature 1..18: note = Synthetic
  source 1..18: mol_type = other DNA
tcgaccataacacagcac

SEQ ID NO: 1301 - DNA, 18 bp, synthetic construct
  misc_feature 1..18: note = Synthetic
  source 1..18: mol_type = other DNA
catcgaccataacacagc

SEQ ID NO: 1302 - DNA, 18 bp, synthetic construct
  misc_feature 1..18: note = Synthetic
  source 1..18: mol_type = other DNA
gccatcgaccataacaca

SEQ ID NO: 1303 - DNA, 18 bp, synthetic construct
  misc_feature 1..18: note = Synthetic
  source 1..18: mol_type = other DNA
gagccatcgaccataaca

SEQ ID NO: 1304 - DNA, 18 bp, synthetic construct
  misc_feature 1..18: note = Synthetic
  source 1..18: mol_type = other DNA
aggagccatcgaccataa

SEQ ID NO: 1305 - DNA, 18 bp, synthetic construct
  misc_feature 1..18: note = Synthetic
  source 1..18: mol_type = other DNA
ccaggagccatcgaccat

SEQ ID NO: 1306 - DNA, 18 bp, synthetic construct
  misc_feature 1..18: note = Synthetic
  source 1..18: mol_type = other DNA
ccccaggagccatcgacc

SEQ ID NO: 1307 - DNA, 18 bp, synthetic construct
  misc_feature 1..18: note = Synthetic
  source 1..18: mol_type = other DNA
acccccaggagccatcga

SEQ ID NO: 1308 - DNA, 18 bp, synthetic construct
  misc_feature 1..18: note = Synthetic
  source 1..18: mol_type = other DNA
gcacccccaggagccatc

SEQ ID NO: 1309 - DNA, 18 bp, synthetic construct
  misc_feature 1..18: note = Synthetic
  source 1..18: mol_type = other DNA
cagcacccccaggagcca

SEQ ID NO: 1310 - DNA, 18 bp, synthetic construct
  misc_feature 1..18: note = Synthetic
  source 1..18: mol_type = other DNA
ggcagcacccccaggagc

SEQ ID NO: 1311 - DNA, 18 bp, synthetic construct
  misc_feature 1..18: note = Synthetic
  source 1..18: mol_type = other DNA
ggggcagcacccccagga

SEQ ID NO: 1312 - DNA, 18 bp, synthetic construct
  misc_feature 1..18: note = Synthetic
  source 1..18: mol_type = other DNA
atggggcagcacccccag

SEQ ID NO: 1313 - DNA, 18 bp, synthetic construct
  misc_feature 1..18: note = Synthetic
  source 1..18: mol_type = other DNA
gcatggggcagcaccccc

SEQ ID NO: 1314 - DNA, 18 bp, synthetic construct
  misc_feature 1..18: note = Synthetic
  source 1..18: mol_type = other DNA
gggcatggggcagcaccc

SEQ ID NO: 1315 - DNA, 18 bp, synthetic construct
  misc_feature 1..18: note = Synthetic
  source 1..18: mol_type = other DNA
tggggcatggggcagcac

SEQ ID NO: 1316 - DNA, 18 bp, synthetic construct
  misc_feature 1..18: note = Synthetic
  source 1..18: mol_type = other DNA
tctcccccagatttgtac

SEQ ID NO: 1317 - DNA, 18 bp, synthetic construct
  misc_feature 1..18: note = Synthetic
  source 1..18: mol_type = other DNA
catctcccccagatttgt

SEQ ID NO: 1318 - DNA, 18 bp, synthetic construct
  misc_feature 1..18: note = Synthetic
  source 1..18: mol_type = other DNA
cccatctcccccagattt

SEQ ID NO: 1319 - DNA, 18 bp, synthetic construct
  misc_feature 1..18: note = Synthetic
  source 1..18: mol_type = other DNA
cccccatctcccccagat

SEQ ID NO: 1320 - DNA, 18 bp, synthetic construct
  misc_feature 1..18: note = Synthetic
  source 1..18: mol_type = other DNA
tacccccatctcccccag

SEQ ID NO: 1321 - DNA, 18 bp, synthetic construct
  misc_feature 1..18: note = Synthetic
  source 1..18: mol_type = other DNA
catacccccatctccccc

SEQ ID NO: 1322 - DNA, 18 bp, synthetic construct
  misc_feature 1..18: note = Synthetic
  source 1..18: mol_type = other DNA
cacatacccccatctccc

SEQ ID NO: 1323 - DNA, 18 bp, synthetic construct
  misc_feature 1..18: note = Synthetic
  source 1..18: mol_type = other DNA
tccacatacccccatctc

SEQ ID NO: 1324 - DNA, 18 bp, synthetic construct
  misc_feature 1..18: note = Synthetic
  source 1..18: mol_type = other DNA
cctccacatacccccatc

SEQ ID NO: 1325 - DNA, 18 bp, synthetic construct
  misc_feature 1..18: note = Synthetic
  source 1..18: mol_type = other DNA
tccctccacataccccca

SEQ ID NO: 1326 - DNA, 18 bp, synthetic construct
  misc_feature 1..18: note = Synthetic
  source 1..18: mol_type = other DNA
cttccctccacatacccc

SEQ ID NO: 1327 - DNA, 18 bp, synthetic construct
  misc_feature 1..18: note = Synthetic
  source 1..18: mol_type = other DNA
cacttccctccacatacc

SEQ ID NO: 1328 - DNA, 18 bp, synthetic construct
  misc_feature 1..18: note = Synthetic
  source 1..18: mol_type = other DNA
cccacttccctccacata

SEQ ID NO: 1329 - DNA, 18 bp, synthetic construct
  misc_feature 1..18: note = Synthetic
  source 1..18: mol_type = other DNA
cccccacttccctccaca

SEQ ID NO: 1330 - DNA, 18 bp, synthetic construct
  misc_feature 1..18: note = Synthetic
  source 1..18: mol_type = other DNA
tgcccccacttccctcca

SEQ ID NO: 1331 - DNA, 18 bp, synthetic construct
  misc_feature 1..18: note = Synthetic
  source 1..18: mol_type = other DNA
tctgcccccacttccctc

SEQ ID NO: 1332 - DNA, 18 bp, synthetic construct
  misc_feature 1..18: note = Synthetic
  source 1..18: mol_type = other DNA
actctgcccccacttccc

SEQ ID NO: 1333 - DNA, 18 bp, synthetic construct
  misc_feature 1..18: note = Synthetic
  source 1..18: mol_type = other DNA
ccctgcccctggccccca

SEQ ID NO: 1334 - DNA, 18 bp, synthetic construct
  misc_feature 1..18: note = Synthetic
  source 1..18: mol_type = other DNA
ccccctgcccctggcccc

SEQ ID NO: 1335 - DNA, 18 bp, synthetic construct
  misc_feature 1..18: note = Synthetic
  source 1..18: mol_type = other DNA
caccccctgcccctggcc

SEQ ID NO: 1336 - DNA, 18 bp, synthetic construct
  misc_feature 1..18: note = Synthetic
  source 1..18: mol_type = other DNA
ttcaccccctgcccctgg

SEQ ID NO: 1337 - DNA, 18 bp, synthetic construct
  misc_feature 1..18: note = Synthetic
  source 1..18: mol_type = other DNA
tcttcaccccctgcccct

SEQ ID NO: 1338 - DNA, 18 bp, synthetic construct
  misc_feature 1..18: note = Synthetic
  source 1..18: mol_type = other DNA
cgtcttcaccccctgccc

SEQ ID NO: 1339 - DNA, 18 bp, synthetic construct
  misc_feature 1..18: note = Synthetic
  source 1..18: mol_type = other DNA
tccgtcttcaccccctgc

SEQ ID NO: 1340 - DNA, 18 bp, synthetic construct
  misc_feature 1..18: note = Synthetic
  source 1..18: mol_type = other DNA
actccgtcttcaccccct

SEQ ID NO: 1341 - DNA, 18 bp, synthetic construct
  misc_feature 1..18: note = Synthetic
  source 1..18: mol_type = other DNA
tgactccgtcttcacccc

SEQ ID NO: 1342 - DNA, 18 bp, synthetic construct
  misc_feature 1..18: note = Synthetic
  source 1..18: mol_type = other DNA
cctgactccgtcttcacc

SEQ ID NO: 1343 - DNA, 18 bp, synthetic construct
  misc_feature 1..18: note = Synthetic
  source 1..18: mol_type = other DNA
gtcctgactccgtcttca

SEQ ID NO: 1344 - DNA, 18 bp, synthetic construct
  misc_feature 1..18: note = Synthetic
  source 1..18: mol_type = other DNA
tggtcctgactccgtctt

SEQ ID NO: 1345 - DNA, 18 bp, synthetic construct
  misc_feature 1..18: note = Synthetic
  source 1..18: mol_type = other DNA
aatggtcctgactccgtc

SEQ ID NO: 1346 - DNA, 18 bp, synthetic construct
  misc_feature 1..18: note = Synthetic
  source 1..18: mol_type = other DNA
aaaatggtcctgactccg

SEQ ID NO: 1347 - DNA, 18 bp, synthetic construct
  misc_feature 1..18: note = Synthetic
  source 1..18: mol_type = other DNA
aaaaaatggtcctgactc

SEQ ID NO: 1348 - DNA, 18 bp, synthetic construct
  misc_feature 1..18: note = Synthetic
  source 1..18: mol_type = other DNA
agaaaaaatggtcctgac

SEQ ID NO: 1349 - DNA, 18 bp, synthetic construct
  misc_feature 1..18: note = Synthetic
  source 1..18: mol_type = other DNA
tgagaaaaaatggtcctg

SEQ ID NO: 1350 - DNA, 18 bp, synthetic construct
  misc_feature 1..18: note = Synthetic
  source 1..18: mol_type = other DNA
gtcttcacagcaggaagc

SEQ ID NO: 1351 - DNA, 18 bp, synthetic construct
  misc_feature 1..18: note = Synthetic
  source 1..18: mol_type = other DNA
ctgtcttcacagcaggaa

SEQ ID NO: 1352 - DNA, 18 bp, synthetic construct
  misc_feature 1..18: note = Synthetic
  source 1..18: mol_type = other DNA
ccctgtcttcacagcagg

SEQ ID NO: 1353 - DNA, 18 bp, synthetic construct
  misc_feature 1..18: note = Synthetic
  source 1..18: mol_type = other DNA
caccctgtcttcacagca

SEQ ID NO: 1354 - DNA, 18 bp, synthetic construct
  misc_feature 1..18: note = Synthetic
  source 1..18: mol_type = other DNA
tgcaccctgtcttcacag

SEQ ID NO: 1355 - DNA, 18 bp, synthetic construct
  misc_feature 1..18: note = Synthetic
  source 1..18: mol_type = other DNA
agtgcaccctgtcttcac

SEQ ID NO: 1356 - DNA, 18 bp, synthetic construct
  misc_feature 1..18: note = Synthetic
  source 1..18: mol_type = other DNA
gcagtgcaccctgtcttc

SEQ ID NO: 1357 - DNA, 18 bp, synthetic construct
  misc_feature 1..18: note = Synthetic
  source 1..18: mol_type = other DNA
cagcagtgcaccctgtct

SEQ ID NO: 1358 - DNA, 18 bp, synthetic construct
  misc_feature 1..18: note = Synthetic
  source 1..18: mol_type = other DNA
gacagcagtgcaccctgt

SEQ ID NO: 1359 - DNA, 18 bp, synthetic construct
  misc_feature 1..18: note = Synthetic
  source 1..18: mol_type = other DNA
cggacagcagtgcaccct

SEQ ID NO: 1360 - DNA, 18 bp, synthetic construct
  misc_feature 1..18: note = Synthetic
  source 1..18: mol_type = other DNA
tgcggacagcagtgcacc

SEQ ID NO: 1361 - DNA, 18 bp, synthetic construct
  misc_feature 1..18: note = Synthetic
  source 1..18: mol_type = other DNA
cgtgcggacagcagtgca

SEQ ID NO: 1362 - DNA, 18 bp, synthetic construct
  misc_feature 1..18: note = Synthetic
  source 1..18: mol_type = other DNA
accgtgcggacagcagtg

SEQ ID NO: 1363 - DNA, 18 bp, synthetic construct
  misc_feature 1..18: note = Synthetic
  source 1..18: mol_type = other DNA
gcaccgtgcggacagcag

SEQ ID NO: 1364 - DNA, 18 bp, synthetic construct
  misc_feature 1..18: note = Synthetic
  source 1..18: mol_type = other DNA
aggcaccgtgcggacagc

SEQ ID NO: 1365 - DNA, 18 bp, synthetic construct
  misc_feature 1..18: note = Synthetic
  source 1..18: mol_type = other DNA
gaaggcaccgtgcggaca

SEQ ID NO: 1366 - DNA, 18 bp, synthetic construct
  misc_feature 1..18: note = Synthetic
  source 1..18: mol_type = other DNA
cagaaggcaccgtgcgga

SEQ ID NO: 1367 - DNA, 18 bp, synthetic construct
  misc_feature 1..18: note = Synthetic
  source 1..18: mol_type = other DNA
cgcagaaggcaccgtgcg

SEQ ID NO: 1368 - DNA, 18 bp, synthetic construct
  misc_feature 1..18: note = Synthetic
  source 1..18: mol_type = other DNA
gtcgcagaaggcaccgtg

SEQ ID NO: 1369 - DNA, 18 bp, synthetic construct
  misc_feature 1..18: note = Synthetic
  source 1..18: mol_type = other DNA
aggtcgcagaaggcaccg

SEQ ID NO: 1370 - DNA, 18 bp, synthetic construct
  misc_feature 1..18: note = Synthetic
  source 1..18: mol_type = other DNA
ccaggtcgcagaaggcac

SEQ ID NO: 1371 - DNA, 18 bp, synthetic construct
  misc_feature 1..18: note = Synthetic
  source 1..18: mol_type = other DNA
aaccaggtcgcagaaggc

SEQ ID NO: 1372 - DNA, 18 bp, synthetic construct
  misc_feature 1..18: note = Synthetic
  source 1..18: mol_type = other DNA
tgaaccaggtcgcagaag

SEQ ID NO: 1373 - DNA, 18 bp, synthetic construct
  misc_feature 1..18: note = Synthetic
  source 1..18: mol_type = other DNA
tgtgaaccaggtcgcaga

SEQ ID NO: 1374 - DNA, 18 bp, synthetic construct
  misc_feature 1..18: note = Synthetic
  source 1..18: mol_type = other DNA
ggtgtgaaccaggtcgca

SEQ ID NO: 1375 - DNA, 18 bp, synthetic construct
  misc_feature 1..18: note = Synthetic
  source 1..18: mol_type = other DNA
cgggtgtgaaccaggtcg

SEQ ID NO: 1376 - DNA, 18 bp, synthetic construct
  misc_feature 1..18: note = Synthetic
  source 1..18: mol_type = other DNA
agcgggtgtgaaccaggt

SEQ ID NO: 1377 - DNA, 18 bp, synthetic construct
  misc_feature 1..18: note = Synthetic
  source 1..18: mol_type = other DNA
gcagcgggtgtgaaccag

SEQ ID NO: 1378 - DNA, 18 bp, synthetic construct
  misc_feature 1..18: note = Synthetic
  source 1..18: mol_type = other DNA
atgcagcgggtgtgaacc

SEQ ID NO: 1379 - DNA, 18 bp, synthetic construct
  misc_feature 1..18: note = Synthetic
  source 1..18: mol_type = other DNA
tgatgcagcgggtgtgaa

SEQ ID NO: 1380 - DNA, 18 bp, synthetic construct
  misc_feature 1..18: note = Synthetic
  source 1..18: mol_type = other DNA
tgtgatgcagcgggtgtg

SEQ ID NO: 1381 - DNA, 18 bp, synthetic construct
  misc_feature 1..18: note = Synthetic
  source 1..18: mol_type = other DNA
ggtgtgatgcagcgggtg

SEQ ID NO: 1382 - DNA, 18 bp, synthetic construct
  misc_feature 1..18: note = Synthetic
  source 1..18: mol_type = other DNA
tgggtgtgatgcagcggg

SEQ ID NO: 1383 - DNA, 18 bp, synthetic construct
  misc_feature 1..18: note = Synthetic
  source 1..18: mol_type = other DNA
cgtgggtgtgatgcagcg

SEQ ID NO: 1384 - DNA, 18 bp, synthetic construct
  misc_feature 1..18: note = Synthetic
  source 1..18: mol_type = other DNA
cccgtgggtgtgatgcag

SEQ ID NO: 1385 - DNA, 18 bp, synthetic construct
  misc_feature 1..18: note = Synthetic
  source 1..18: mol_type = other DNA
tgcccgtgggtgtgatgc

SEQ ID NO: 1386 - DNA, 18 bp, synthetic construct
  misc_feature 1..18: note = Synthetic
  source 1..18: mol_type = other DNA
ggtgcccgtgggtgtgat

SEQ ID NO: 1387 - DNA, 18 bp, synthetic construct
  misc_feature 1..18: note = Synthetic
  source 1..18: mol_type = other DNA
tgggtgcccgtgggtgtg

SEQ ID NO: 1388 - DNA, 18 bp, synthetic construct
  misc_feature 1..18: note = Synthetic
  source 1..18: mol_type = other DNA
ggtgggtgcccgtgggtg

SEQ ID NO: 1389 - DNA, 18 bp, synthetic construct
  misc_feature 1..18: note = Synthetic
  source 1..18: mol_type = other DNA
ggggtgggtgcccgtggg

SEQ ID NO: 1390 - DNA, 18 bp, synthetic construct
  misc_feature 1..18: note = Synthetic
  source 1..18: mol_type = other DNA
agggggtgggtgcccgtg

SEQ ID NO: 1391 - DNA, 18 bp, synthetic construct
  misc_feature 1..18: note = Synthetic
  source 1..18: mol_type = other DNA
ccagggggtgggtgcccg

SEQ ID NO: 1392 - DNA, 18 bp, synthetic construct
  misc_feature 1..18: note = Synthetic
  source 1..18: mol_type = other DNA
tgccagggggtgggtgcc

SEQ ID NO: 1393 - DNA, 18 bp, synthetic construct
  misc_feature 1..18: note = Synthetic
  source 1..18: mol_type = other DNA
tttgccagggggtgggtg

SEQ ID NO: 1394 - DNA, 18 bp, synthetic construct
  misc_feature 1..18: note = Synthetic
  source 1..18: mol_type = other DNA
tctttgccagggggtggg

SEQ ID NO: 1395 - DNA, 18 bp, synthetic construct
  misc_feature 1..18: note = Synthetic
  source 1..18: mol_type = other DNA
cttctttgccagggggtg

SEQ ID NO: 1396 - DNA, 18 bp, synthetic construct
  misc_feature 1..18: note = Synthetic
  source 1..18: mol_type = other DNA
agcttctttgccaggggg

SEQ ID NO: 1397 - DNA, 18 bp, synthetic construct
  misc_feature 1..18: note = Synthetic
  source 1..18: mol_type = other DNA
ggagcttctttgccaggg

SEQ ID NO: 1398 - DNA, 18 bp, synthetic construct
  misc_feature 1..18: note = Synthetic
  source 1..18: mol_type = other DNA
agggagcttctttgccag

SEQ ID NO: 1399 - DNA, 18 bp, synthetic construct
  misc_feature 1..18: note = Synthetic
  source 1..18: mol_type = other DNA
gcagggagcttctttgcc

SEQ ID NO: 1400 - DNA, 18 bp, synthetic construct
  misc_feature 1..18: note = Synthetic
  source 1..18: mol_type = other DNA
gggcagggagcttctttg

SEQ ID NO: 1401 - DNA, 18 bp, synthetic construct
  misc_feature 1..18: note = Synthetic
  source 1..18: mol_type = other DNA
ctgggcagggagcttctt

SEQ ID NO: 1402 - DNA, 18 bp, synthetic construct
  misc_feature 1..18: note = Synthetic
  source 1..18: mol_type = other DNA
ctctgggcagggagcttc

SEQ ID NO: 1403 - DNA, 18 bp, synthetic construct
  misc_feature 1..18: note = Synthetic
  source 1..18: mol_type = other DNA
tcctctgggcagggagct

SEQ ID NO: 1404 - DNA, 18 bp, synthetic construct
  misc_feature 1..18: note = Synthetic
  source 1..18: mol_type = other DNA
agtcctctgggcagggag

SEQ ID NO: 1405 - DNA, 18 bp, synthetic construct
  misc_feature 1..18: note = Synthetic
  source 1..18: mol_type = other DNA
ttagtcctctgggcaggg

SEQ ID NO: 1406 - DNA, 18 bp, synthetic construct
  misc_feature 1..18: note = Synthetic
  source 1..18: mol_type = other DNA
tgttagtcctctgggcag

SEQ ID NO: 1407 - DNA, 18 bp, synthetic construct
  misc_feature 1..18: note = Synthetic
  source 1..18: mol_type = other DNA
cctgttagtcctctgggc

SEQ ID NO: 1408 - DNA, 18 bp, synthetic construct
  misc_feature 1..18: note = Synthetic
  source 1..18: mol_type = other DNA
gccctgttagtcctctgg

SEQ ID NO: 1409 - DNA, 18 bp, synthetic construct
  misc_feature 1..18: note = Synthetic
  source 1..18: mol_type = other DNA
ctgccctgttagtcctct

SEQ ID NO: 1410 - DNA, 18 bp, synthetic construct
  misc_feature 1..18: note = Synthetic
  source 1..18: mol_type = other DNA
acctgccctgttagtcct

SEQ ID NO: 1411 - DNA, 18 bp, synthetic construct
  misc_feature 1..18: note = Synthetic
  source 1..18: mol_type = other DNA
tcacctgccctgttagtc

SEQ ID NO: 1412 - DNA, 18 bp, synthetic construct
  misc_feature 1..18: note = Synthetic
  source 1..18: mol_type = other DNA
cctcacctgccctgttag

SEQ ID NO: 1413 - DNA, 18 bp, synthetic construct
  misc_feature 1..18: note = Synthetic
  source 1..18: mol_type = other DNA
ctcctcacctgccctgtt

SEQ ID NO: 1414 - DNA, 18 bp, synthetic construct
  misc_feature 1..18: note = Synthetic
  source 1..18: mol_type = other DNA
acctcctcacctgccctg

SEQ ID NO: 1415 - DNA, 18 bp, synthetic construct
  misc_feature 1..18: note = Synthetic
  source 1..18: mol_type = other DNA
ccacctcctcacctgccc

SEQ ID NO: 1416 - DNA, 18 bp, synthetic construct
  misc_feature 1..18: note = Synthetic
  source 1..18: mol_type = other DNA
tcccacctcctcacctgc

SEQ ID NO: 1417 - DNA, 18 bp, synthetic construct
  misc_feature 1..18: note = Synthetic
  source 1..18: mol_type = other DNA
tctcccacctcctcacct

SEQ ID NO: 1418 - DNA, 18 bp, synthetic construct
  misc_feature 1..18: note = Synthetic
  source 1..18: mol_type = other DNA
gctctcccacctcctcac

SEQ ID NO: 1419 - DNA, 18 bp, synthetic construct
  misc_feature 1..18: note = Synthetic
  source 1..18: mol_type = other DNA
atgctctcccacctcctc

SEQ ID NO: 1420 - DNA, 18 bp, synthetic construct
  misc_feature 1..18: note = Synthetic
  source 1..18: mol_type = other DNA
tgatgctctcccacctcc

SEQ ID NO: 1421 - DNA, 18 bp, synthetic construct
  misc_feature 1..18: note = Synthetic
  source 1..18: mol_type = other DNA
cctgatgctctcccacct

SEQ ID NO: 1422 - DNA, 18 bp, synthetic construct
  misc_feature 1..18: note = Synthetic
  source 1..18: mol_type = other DNA
ggcctgatgctctcccac

SEQ ID NO: 1423 - DNA, 18 bp, synthetic construct
  misc_feature 1..18: note = Synthetic
  source 1..18: mol_type = other DNA
ctggcctgatgctctccc

SEQ ID NO: 1424 - DNA, 18 bp, synthetic construct
  misc_feature 1..18: note = Synthetic
  source 1..18: mol_type = other DNA
ccctggcctgatgctctc

SEQ ID NO: 1425 - DNA, 18 bp, synthetic construct
  misc_feature 1..18: note = Synthetic
  source 1..18: mol_type = other DNA
gcccctggcctgatgctc

SEQ ID NO: 1426 - DNA, 18 bp, synthetic construct
  misc_feature 1..18: note = Synthetic
  source 1..18: mol_type = other DNA
cagcccctggcctgatgc

SEQ ID NO: 1427 - DNA, 18 bp, synthetic construct
  misc_feature 1..18: note = Synthetic
  source 1..18: mol_type = other DNA
cccagcccctggcctgat

SEQ ID NO: 1428 - DNA, 18 bp, synthetic construct
  misc_feature 1..18: note = Synthetic
  source 1..18: mol_type = other DNA
gccccagcccctggcctg

SEQ ID NO: 1429 - DNA, 18 bp, synthetic construct
  misc_feature 1..18: note = Synthetic
  source 1..18: mol_type = other DNA
ccgccccagcccctggcc

SEQ ID NO: 1430 - DNA, 18 bp, synthetic construct
  misc_feature 1..18: note = Synthetic
  source 1..18: mol_type = other DNA
ccccgccccagcccctgg

SEQ ID NO: 1431 - DNA, 18 bp, synthetic construct
  misc_feature 1..18: note = Synthetic
  source 1..18: mol_type = other DNA
ggccccgccccagcccct

SEQ ID NO: 1432 - DNA, 18 bp, synthetic construct
  misc_feature 1..18: note = Synthetic
  source 1..18: mol_type = other DNA
gaggccccgccccagccc

SEQ ID NO: 1433 - DNA, 18 bp, synthetic construct
  misc_feature 1..18: note = Synthetic
  source 1..18: mol_type = other DNA
atgaggccccgccccagc

SEQ ID NO: 1434 - DNA, 18 bp, synthetic construct
  misc_feature 1..18: note = Synthetic
  source 1..18: mol_type = other DNA
caatgaggccccgcccca

SEQ ID NO: 1435 - DNA, 18 bp, synthetic construct
  misc_feature 1..18: note = Synthetic
  source 1..18: mol_type = other DNA
atggaggaaactttttcc

SEQ ID NO: 1436 - DNA, 18 bp, synthetic construct
  misc_feature 1..18: note = Synthetic
  source 1..18: mol_type = other DNA
ggatggaggaaacttttt

SEQ ID NO: 1437 - DNA, 18 bp, synthetic construct
  misc_feature 1..18: note = Synthetic
  source 1..18: mol_type = other DNA
caggatggaggaaacttt

SEQ ID NO: 1438 - DNA, 18 bp, synthetic construct
  misc_feature 1..18: note = Synthetic
  source 1..18: mol_type = other DNA
gccaggatggaggaaact

SEQ ID NO: 1439 - DNA, 18 bp, synthetic construct
  misc_feature 1..18: note = Synthetic
  source 1..18: mol_type = other DNA
cagccaggatggaggaaa

SEQ ID NO: 1440 - DNA, 18 bp, synthetic construct
  misc_feature 1..18: note = Synthetic
  source 1..18: mol_type = other DNA
ggcagccaggatggagga

SEQ ID NO: 1441 - DNA, 18 bp, synthetic construct
  misc_feature 1..18: note = Synthetic
  source 1..18: mol_type = other DNA
ggggcagccaggatggag

SEQ ID NO: 1442 - DNA, 18 bp, synthetic construct
  misc_feature 1..18: note = Synthetic
  source 1..18: mol_type = other DNA
gaggggcagccaggatgg

SEQ ID NO: 1443 - DNA, 18 bp, synthetic construct
  misc_feature 1..18: note = Synthetic
  source 1..18: mol_type = other DNA
gtgaggggcagccaggat

SEQ ID NO: 1444 - DNA, 18 bp, synthetic construct
  misc_feature 1..18: note = Synthetic
  source 1..18: mol_type = other DNA
acgtgaggggcagccagg

SEQ ID NO: 1445 - DNA, 18 bp, synthetic construct
  misc_feature 1..18: note = Synthetic
  source 1..18: mol_type = other DNA
aaacgtgaggggcagcca

SEQ ID NO: 1446 - DNA, 18 bp, synthetic construct
  misc_feature 1..18: note = Synthetic
  source 1..18: mol_type = other DNA
gcaaacgtgaggggcagc

SEQ ID NO: 1447 - DNA, 18 bp, synthetic construct
  misc_feature 1..18: note = Synthetic
  source 1..18: mol_type = other DNA
gagcaaacgtgaggggca

SEQ ID NO: 1448 - DNA, 18 bp, synthetic construct
  misc_feature 1..18: note = Synthetic
  source 1..18: mol_type = other DNA
aggagcaaacgtgagggg

SEQ ID NO: 1449 - DNA, 18 bp, synthetic construct
  misc_feature 1..18: note = Synthetic
  source 1..18: mol_type = other DNA
agaggagcaaacgtgagg

SEQ ID NO: 1450 - DNA, 18 bp, synthetic construct
  misc_feature 1..18: note = Synthetic
  source 1..18: mol_type = other DNA
gaagaggagcaaacgtga

SEQ ID NO: 1451 - DNA, 18 bp, synthetic construct
  misc_feature 1..18: note = Synthetic
  source 1..18: mol_type = other DNA
tggaagaggagcaaacgt

SEQ ID NO: 1452 - DNA, 18 bp, synthetic construct
  misc_feature 1..18: note = Synthetic
  source 1..18: mol_type = other DNA
ccgagctggacaaggcca

SEQ ID NO: 1453 - DNA, 18 bp, synthetic construct
  misc_feature 1..18: note = Synthetic
  source 1..18: mol_type = other DNA
gaccgagctggacaaggc

SEQ ID NO: 1454 - DNA, 18 bp, synthetic construct
  misc_feature 1..18: note = Synthetic
  source 1..18: mol_type = other DNA
atgaccgagctggacaag

SEQ ID NO: 1455 - DNA, 18 bp, synthetic construct
  misc_feature 1..18: note = Synthetic
  source 1..18: mol_type = other DNA
acatgaccgagctggaca

SEQ ID NO: 1456 - DNA, 18 bp, synthetic construct
  misc_feature 1..18: note = Synthetic
  source 1..18: mol_type = other DNA
acacatgaccgagctgga

SEQ ID NO: 1457 - DNA, 18 bp, synthetic construct
  misc_feature 1..18: note = Synthetic
  source 1..18: mol_type = other DNA
ggacacatgaccgagctg

SEQ ID NO: 1458 - DNA, 18 bp, synthetic construct
  misc_feature 1..18: note = Synthetic
  source 1..18: mol_type = other DNA
ccggacacatgaccgagc

SEQ ID NO: 1459 - DNA, 18 bp, synthetic construct
  misc_feature 1..18: note = Synthetic
  source 1..18: mol_type = other DNA
gtccggacacatgaccga

SEQ ID NO: 1460 - DNA, 18 bp, synthetic construct
  misc_feature 1..18: note = Synthetic
  source 1..18: mol_type = other DNA
gcgtccggacacatgacc

SEQ ID NO: 1461 - DNA, 18 bp, synthetic construct
  misc_feature 1..18: note = Synthetic
  source 1..18: mol_type = other DNA
gtgcgtccggacacatga

SEQ ID NO: 1462 - DNA, 18 bp, synthetic construct
  misc_feature 1..18: note = Synthetic
  source 1..18: mol_type = other DNA
ccgtgcgtccggacacat

SEQ ID NO: 1463 - DNA, 18 bp, synthetic construct
  misc_feature 1..18: note = Synthetic
  source 1..18: mol_type = other DNA
gaccgtgcgtccggacac

SEQ ID NO: 1464 - DNA, 18 bp, synthetic construct
  misc_feature 1..18: note = Synthetic
  source 1..18: mol_type = other DNA
gggaccgtgcgtccggac

SEQ ID NO: 1465 - DNA, 18 bp, synthetic construct
  misc_feature 1..18: note = Synthetic
  source 1..18: mol_type = other DNA
ccgggaccgtgcgtccgg

SEQ ID NO: 1466 - DNA, 18 bp, synthetic construct
  misc_feature 1..18: note = Synthetic
  source 1..18: mol_type = other DNA
caccgggaccgtgcgtcc

SEQ ID NO: 1467 - DNA, 18 bp, synthetic construct
  misc_feature 1..18: note = Synthetic
  source 1..18: mol_type = other DNA
ggcaccgggaccgtgcgt

SEQ ID NO: 1468 - DNA, 18 bp, synthetic construct
  misc_feature 1..18: note = Synthetic
  source 1..18: mol_type = other DNA
agggcaccgggaccgtgc

SEQ ID NO: 1469 - DNA, 18 bp, synthetic construct
  misc_feature 1..18: note = Synthetic
  source 1..18: mol_type = other DNA
tcagggcaccgggaccgt

SEQ ID NO: 1470 - DNA, 18 bp, synthetic construct
  misc_feature 1..18: note = Synthetic
  source 1..18: mol_type = other DNA
catcagggcaccgggacc

SEQ ID NO: 1471 - DNA, 18 bp, synthetic construct
  misc_feature 1..18: note = Synthetic
  source 1..18: mol_type = other DNA
accatcagggcaccggga

SEQ ID NO: 1472 - DNA, 18 bp, synthetic construct
  misc_feature 1..18: note = Synthetic
  source 1..18: mol_type = other DNA
gaaccatcagggcaccgg

SEQ ID NO: 1473 - DNA, 18 bp, synthetic construct
  misc_feature 1..18: note = Synthetic
  source 1..18: mol_type = other DNA
tagaaccatcagggcacc

SEQ ID NO: 1474 - DNA, 18 bp, synthetic construct
  misc_feature 1..18: note = Synthetic
  source 1..18: mol_type = other DNA
ggtagaaccatcagggca

SEQ ID NO: 1475 - DNA, 18 bp, synthetic construct
  misc_feature 1..18: note = Synthetic
  source 1..18: mol_type = other DNA
caggtagaaccatcaggg

SEQ ID NO: 1476 - DNA, 18 bp, synthetic construct
  misc_feature 1..18: note = Synthetic
  source 1..18: mol_type = other DNA
agcaggtagaaccatcag

SEQ ID NO: 1477 - DNA, 18 bp, synthetic construct
  misc_feature 1..18: note = Synthetic
  source 1..18: mol_type = other DNA
acagcaggtagaaccatc

SEQ ID NO: 1478 - DNA, 18 bp, synthetic construct
  misc_feature 1..18: note = Synthetic
  source 1..18: mol_type = other DNA
tcacagcaggtagaacca

SEQ ID NO: 1479 - DNA, 18 bp, synthetic construct
  misc_feature 1..18: note = Synthetic
  source 1..18: mol_type = other DNA
gctcacagcaggtagaac

SEQ ID NO: 1480 - DNA, 18 bp, synthetic construct
  misc_feature 1..18: note = Synthetic
  source 1..18: mol_type = other DNA
cagctcacagcaggtaga

SEQ ID NO: 1481 - DNA, 18 bp, synthetic construct
  misc_feature 1..18: note = Synthetic
  source 1..18: mol_type = other DNA
ggcagctcacagcaggta

SEQ ID NO: 1482 - DNA, 18 bp, synthetic construct
  misc_feature 1..18: note = Synthetic
  source 1..18: mol_type = other DNA
tgggcagctcacagcagg

SEQ ID NO: 1483 - DNA, 18 bp, synthetic construct
  misc_feature 1..18: note = Synthetic
  source 1..18: mol_type = other DNA
actgggcagctcacagca

SEQ ID NO: 1484 - DNA, 18 bp, synthetic construct
  misc_feature 1..18: note = Synthetic
  source 1..18: mol_type = other DNA
ccactgggcagctcacag

SEQ ID NO: 1485 - DNA, 18 bp, synthetic construct
  misc_feature 1..18: note = Synthetic
  source 1..18: mol_type = other DNA
tcccactgggcagctcac

SEQ ID NO: 1486 - DNA, 18 bp, synthetic construct
  misc_feature 1..18: note = Synthetic
  source 1..18: mol_type = other DNA
cttcccactgggcagctc

SEQ ID NO: 1487 - DNA, 18 bp, synthetic construct
  misc_feature 1..18: note = Synthetic
  source 1..18: mol_type = other DNA
tacttcccactgggcagc

SEQ ID NO: 1488 - DNA, 18 bp, synthetic construct
  misc_feature 1..18: note = Synthetic
  source 1..18: mol_type = other DNA
catacttcccactgggca

SEQ ID NO: 1489 - DNA, 18 bp, synthetic construct
  misc_feature 1..18: note = Synthetic
  source 1..18: mol_type = other DNA
gccatacttcccactggg

SEQ ID NO: 1490 - DNA, 18 bp, synthetic construct
  misc_feature 1..18: note = Synthetic
  source 1..18: mol_type = other DNA
cagccatacttcccactg

SEQ ID NO: 1491 - DNA, 18 bp, synthetic construct
  misc_feature 1..18: note = Synthetic
  source 1..18: mol_type = other DNA
agcagccatacttcccac

SEQ ID NO: 1492 - DNA, 18 bp, synthetic construct
  misc_feature 1..18: note = Synthetic
  source 1..18: mol_type = other DNA
gcagcagccatacttccc

SEQ ID NO: 1493 - DNA, 18 bp, synthetic construct
  misc_feature 1..18: note = Synthetic
  source 1..18: mol_type = other DNA
gggcagcagccatacttc

SEQ ID NO: 1494 - DNA, 18 bp, synthetic construct
  misc_feature 1..18: note = Synthetic
  source 1..18: mol_type = other DNA
ttgggcagcagccatact

SEQ ID NO: 1495 - DNA, 18 bp, synthetic construct
  misc_feature 1..18: note = Synthetic
  source 1..18: mol_type = other DNA
cattgggcagcagccata

SEQ ID NO: 1496 - DNA, 18 bp, synthetic construct
  misc_feature 1..18: note = Synthetic
  source 1..18: mol_type = other DNA
ggcattgggcagcagcca

SEQ ID NO: 1497 - DNA, 18 bp, synthetic construct
  misc_feature 1..18: note = Synthetic
  source 1..18: mol_type = other DNA
tgggcattgggcagcagc

SEQ ID NO: 1498 - DNA, 18 bp, synthetic construct
  misc_feature 1..18: note = Synthetic
  source 1..18: mol_type = other DNA
gttgggcattgggcagca

SEQ ID NO: 1499 - DNA, 18 bp, synthetic construct
  misc_feature 1..18: note = Synthetic
  source 1..18: mol_type = other DNA
gctccagcccctcactca

SEQ ID NO: 1500 - DNA, 18 bp, synthetic construct
  misc_feature 1..18: note = Synthetic
  source 1..18: mol_type = other DNA
tggctccagcccctcact

SEQ ID NO: 1501 - DNA, 18 bp, synthetic construct
  misc_feature 1..18: note = Synthetic
  source 1..18: mol_type = other DNA
gctggctccagcccctca

SEQ ID NO: 1502 - DNA, 18 bp, synthetic construct
  misc_feature 1..18: note = Synthetic
  source 1..18: mol_type = other DNA
aagctggctccagcccct

SEQ ID NO: 1503 - DNA, 18 bp, synthetic construct
  misc_feature 1..18: note = Synthetic
  source 1..18: mol_type = other DNA
ccaagctggctccagccc

SEQ ID NO: 1504 - DNA, 18 bp, synthetic construct
  misc_feature 1..18: note = Synthetic
  source 1..18: mol_type = other DNA
agccaagctggctccagc

SEQ ID NO: 1505 - DNA, 18 bp, synthetic construct
  misc_feature 1..18: note = Synthetic
  source 1..18: mol_type = other DNA
acagccaagctggctcca

SEQ ID NO: 1506 - DNA, 18 bp, synthetic construct
  misc_feature 1..18: note = Synthetic
  source 1..18: mol_type = other DNA
acacagccaagctggctc

SEQ ID NO: 1507 - DNA, 18 bp, synthetic construct
  misc_feature 1..18: note = Synthetic
  source 1..18: mol_type = other DNA
gcacacagccaagctggc

SEQ ID NO: 1508 - DNA, 18 bp, synthetic construct
  misc_feature 1..18: note = Synthetic
  source 1..18: mol_type = other DNA
gggcacacagccaagctg

SEQ ID NO: 1509 - DNA, 18 bp, synthetic construct
  misc_feature 1..18: note = Synthetic
  source 1..18: mol_type = other DNA
gggggcacacagccaagc

SEQ ID NO: 1510 - DNA, 18 bp, synthetic construct
  misc_feature 1..18: note = Synthetic
  source 1..18: mol_type = other DNA
ctgggggcacacagccaa

SEQ ID NO: 1511 - DNA, 18 bp, synthetic construct
  misc_feature 1..18: note = Synthetic
  source 1..18: mol_type = other DNA
ggctgggggcacacagcc

SEQ ID NO: 1512 - DNA, 18 bp, synthetic construct
  misc_feature 1..18: note = Synthetic
  source 1..18: mol_type = other DNA
gtggctgggggcacacag

SEQ ID NO: 1513 - DNA, 18 bp, synthetic construct
  misc_feature 1..18: note = Synthetic
  source 1..18: mol_type = other DNA
aggtggctgggggcacac

SEQ ID NO: 1514 - DNA, 18 bp, synthetic construct
  misc_feature 1..18: note = Synthetic
  source 1..18: mol_type = other DNA
ccaggtggctgggggcac

SEQ ID NO: 1515 - DNA, 18 bp, synthetic construct
  misc_feature 1..18: note = Synthetic
  source 1..18: mol_type = other DNA
ggccaggtggctgggggc

SEQ ID NO: 1516 - DNA, 18 bp, synthetic construct
  misc_feature 1..18: note = Synthetic
  source 1..18: mol_type = other DNA
ccagccccatgccacaga

SEQ ID NO: 1517 - DNA, 18 bp, synthetic construct
  misc_feature 1..18: note = Synthetic
  source 1..18: mol_type = other DNA
agccagccccatgccaca

SEQ ID NO: 1518 - DNA, 18 bp, synthetic construct
  misc_feature 1..18: note = Synthetic
  source 1..18: mol_type = other DNA
ccagccagccccatgcca

SEQ ID NO: 1519 - DNA, 18 bp, synthetic construct
  misc_feature 1..18: note = Synthetic
  source 1..18: mol_type = other DNA
cctgcatcagccaggctc

SEQ ID NO: 1520 - DNA, 18 bp, synthetic construct
  misc_feature 1..18: note = Synthetic
  source 1..18: mol_type = other DNA
accctgcatcagccaggc

SEQ ID NO: 1521 - DNA, 18 bp, synthetic construct
  misc_feature 1..18: note = Synthetic
  source 1..18: mol_type = other DNA
gaaccctgcatcagccag

SEQ ID NO: 1522 - DNA, 18 bp, synthetic construct
  misc_feature 1..18: note = Synthetic
  source 1..18: mol_type = other DNA
atgaaccctgcatcagcc

SEQ ID NO: 1523 - DNA, 18 bp, synthetic construct
  misc_feature 1..18: note = Synthetic
  source 1..18: mol_type = other DNA
tccaggctcagtagcaca

SEQ ID NO: 1524 - DNA, 18 bp, synthetic construct
  misc_feature 1..18: note = Synthetic
  source 1..18: mol_type = other DNA
cttccaggctcagtagca

SEQ ID NO: 1525 - DNA, 18 bp, synthetic construct
  misc_feature 1..18: note = Synthetic
  source 1..18: mol_type = other DNA
cacttccaggctcagtag

SEQ ID NO: 1526 - DNA, 18 bp, synthetic construct
  misc_feature 1..18: note = Synthetic
  source 1..18: mol_type = other DNA
gtcacttccaggctcagt

SEQ ID NO: 1527 - DNA, 18 bp, synthetic construct
  misc_feature 1..18: note = Synthetic
  source 1..18: mol_type = other DNA
ttgtcacttccaggctca

SEQ ID NO: 1528 - DNA, 18 bp, synthetic construct
  misc_feature 1..18: note = Synthetic
  source 1..18: mol_type = other DNA
ctttgtcacttccaggct

SEQ ID NO: 1529 - DNA, 18 bp, synthetic construct
  misc_feature 1..18: note = Synthetic
  source 1..18: mol_type = other DNA
gtctttgtcacttccagg

SEQ ID NO: 1530 - DNA, 18 bp, synthetic construct
  misc_feature 1..18: note = Synthetic
  source 1..18: mol_type = other DNA
gggtctttgtcacttcca

SEQ ID NO: 1531 - DNA, 18 bp, synthetic construct
  misc_feature 1..18: note = Synthetic
  source 1..18: mol_type = other DNA
gtgggtctttgtcacttc

SEQ ID NO: 1532 - DNA, 18 bp, synthetic construct
  misc_feature 1..18: note = Synthetic
  source 1..18: mol_type = other DNA
gggtgggtctttgtcact

SEQ ID NO: 1533 - DNA, 18 bp, synthetic construct
  misc_feature 1..18: note = Synthetic
  source 1..18: mol_type = other DNA
aggggtgggtctttgtca

SEQ ID NO: 1534 - DNA, 18 bp, synthetic construct
  misc_feature 1..18: note = Synthetic
  source 1..18: mol_type = other DNA
acaggggtgggtctttgt

SEQ ID NO: 1535 - DNA, 18 bp, synthetic construct
  misc_feature 1..18: note = Synthetic
  source 1..18: mol_type = other DNA
ggacaggggtgggtcttt

SEQ ID NO: 1536 - DNA, 18 bp, synthetic construct
  misc_feature 1..18: note = Synthetic
  source 1..18: mol_type = other DNA
ggggacaggggtgggtct

SEQ ID NO: 1537 - DNA, 18 bp, synthetic construct
  misc_feature 1..18: note = Synthetic
  source 1..18: mol_type = other DNA
gtggggacaggggtgggt

SEQ ID NO: 1538 - DNA, 18 bp, synthetic construct
  misc_feature 1..18: note = Synthetic
  source 1..18: mol_type = other DNA
gagtggggacaggggtgg

SEQ ID NO: 1539 - DNA, 18 bp, synthetic construct
  misc_feature 1..18: note = Synthetic
  source 1..18: mol_type = other DNA
ctgagtggggacaggggt

SEQ ID NO: 1540 - DNA, 18 bp, synthetic construct
  misc_feature 1..18: note = Synthetic
  source 1..18: mol_type = other DNA
gatcggagcagcaggtgg

SEQ ID NO: 1541 - DNA, 18 bp, synthetic construct
  misc_feature 1..18: note = Synthetic
  source 1..18: mol_type = other DNA
gtgatcggagcagcaggt

SEQ ID NO: 1542 - DNA, 18 bp, synthetic construct
  misc_feature 1..18: note = Synthetic
  source 1..18: mol_type = other DNA
aggtgatcggagcagcag

SEQ ID NO: 1543 - DNA, 18 bp, synthetic construct
  misc_feature 1..18: note = Synthetic
  source 1..18: mol_type = other DNA
gcaggtgatcggagcagc

SEQ ID NO: 1544 - DNA, 18 bp, synthetic construct
  misc_feature 1..18: note = Synthetic
  source 1..18: mol_type = other DNA
gtgcaggtgatcggagca

SEQ ID NO: 1545 - DNA, 18 bp, synthetic construct
  misc_feature 1..18: note = Synthetic
  source 1..18: mol_type = other DNA
cagtgcaggtgatcggag

SEQ ID NO: 1546 - DNA, 18 bp, synthetic construct
  misc_feature 1..18: note = Synthetic
  source 1..18: mol_type = other DNA
agcagtgcaggtgatcgg

SEQ ID NO: 1547 - DNA, 18 bp, synthetic construct
  misc_feature 1..18: note = Synthetic
  source 1..18: mol_type = other DNA
gcagcagtgcaggtgatc

SEQ ID NO: 1548 - DNA, 18 bp, synthetic construct
  misc_feature 1..18: note = Synthetic
  source 1..18: mol_type = other DNA
gggcagcagtgcaggtga

SEQ ID NO: 1549 - DNA, 18 bp, synthetic construct
  misc_feature 1..18: note = Synthetic
  source 1..18: mol_type = other DNA
gggggcagcagtgcaggt

SEQ ID NO: 1550 - DNA, 18 bp, synthetic construct
  misc_feature 1..18: note = Synthetic
  source 1..18: mol_type = other DNA
ttgggggcagcagtgcag

SEQ ID NO: 1551 - DNA, 18 bp, synthetic construct
  misc_feature 1..18: note = Synthetic
  source 1..18: mol_type = other DNA
tcttgggggcagcagtgc

SEQ ID NO: 1552 - DNA, 18 bp, synthetic construct
  misc_feature 1..18: note = Synthetic
  source 1..18: mol_type = other DNA
tgtcttgggggcagcagt

SEQ ID NO: 1553 - DNA, 18 bp, synthetic construct
  misc_feature 1..18: note = Synthetic
  source 1..18: mol_type = other DNA
agtgtcttgggggcagca

SEQ ID NO: 1554 - DNA, 18 bp, synthetic construct
  misc_feature 1..18: note = Synthetic
  source 1..18: mol_type = other DNA
acagtgtcttgggggcag

SEQ ID NO: 1555 - DNA, 18 bp, synthetic construct
  misc_feature 1..18: note = Synthetic
  source 1..18: mol_type = other DNA
acacagtgtcttgggggc

SEQ ID NO: 1556 - DNA, 18 bp, synthetic construct
  misc_feature 1..18: note = Synthetic
  source 1..18: mol_type = other DNA
acacacagtgtcttgggg

SEQ ID NO: 1557 - DNA, 18 bp, synthetic construct
  misc_feature 1..18: note = Synthetic
  source 1..18: mol_type = other DNA
tcacacacagtgtcttgg

SEQ ID NO: 1558 - DNA, 18 bp, synthetic construct
  misc_feature 1..18: note = Synthetic
  source 1..18: mol_type = other DNA
ggtcacacacagtgtctt

SEQ ID NO: 1559 - DNA, 18 bp, synthetic construct
  misc_feature 1..18: note = Synthetic
  source 1..18: mol_type = other DNA
caggtcacacacagtgtc

SEQ ID NO: 1560 - DNA, 18 bp, synthetic construct
  misc_feature 1..18: note = Synthetic
  source 1..18: mol_type = other DNA
atcaggtcacacacagtg

SEQ ID NO: 1561 - DNA, 18 bp, synthetic construct
  misc_feature 1..18: note = Synthetic
  source 1..18: mol_type = other DNA
ggatcaggtcacacacag

SEQ ID NO: 1562 - DNA, 18 bp, synthetic construct
  misc_feature 1..18: note = Synthetic
  source 1..18: mol_type = other DNA
ctggatcaggtcacacac

SEQ ID NO: 1563 - DNA, 18 bp, synthetic construct
  misc_feature 1..18: note = Synthetic
  source 1..18: mol_type = other DNA
ctctggatcaggtcacac

SEQ ID NO: 1564 - DNA, 18 bp, synthetic construct
  misc_feature 1..18: note = Synthetic
  source 1..18: mol_type = other DNA
tactctggatcaggtcac

SEQ ID NO: 1565 - DNA, 18 bp, synthetic construct
  misc_feature 1..18: note = Synthetic
  source 1..18: mol_type = other DNA
cttactctggatcaggtc

SEQ ID NO: 1566 - DNA, 18 bp, synthetic construct
  misc_feature 1..18: note = Synthetic
  source 1..18: mol_type = other DNA
cacttactctggatcagg

SEQ ID NO: 1567 - DNA, 18 bp, synthetic construct
  misc_feature 1..18: note = Synthetic
  source 1..18: mol_type = other DNA
ggcacttactctggatca

SEQ ID NO: 1568 - DNA, 18 bp, synthetic construct
  misc_feature 1..18: note = Synthetic
  source 1..18: mol_type = other DNA
gaggcacttactctggat

SEQ ID NO: 1569 - DNA, 18 bp, synthetic construct
  misc_feature 1..18: note = Synthetic
  source 1..18: mol_type = other DNA
gagaggcacttactctgg

SEQ ID NO: 1570 - DNA, 18 bp, synthetic construct
  misc_feature 1..18: note = Synthetic
  source 1..18: mol_type = other DNA
tggagaggcacttactct

SEQ ID NO: 1571 - DNA, 18 bp, synthetic construct
  misc_feature 1..18: note = Synthetic
  source 1..18: mol_type = other DNA
cttggagaggcacttact

SEQ ID NO: 1572 - DNA, 18 bp, synthetic construct
  misc_feature 1..18: note = Synthetic
  source 1..18: mol_type = other DNA
tccttggagaggcactta

SEQ ID NO: 1573 - DNA, 18 bp, synthetic construct
  misc_feature 1..18: note = Synthetic
  source 1..18: mol_type = other DNA
tctccttggagaggcact

SEQ ID NO: 1574 - DNA, 18 bp, synthetic construct
  misc_feature 1..18: note = Synthetic
  source 1..18: mol_type = other DNA
gttctccttggagaggca

SEQ ID NO: 1575 - DNA, 18 bp, synthetic construct
  misc_feature 1..18: note = Synthetic
  source 1..18: mol_type = other DNA
gcgttctccttggagagg

SEQ ID NO: 1576 - DNA, 18 bp, synthetic construct
  misc_feature 1..18: note = Synthetic
  source 1..18: mol_type = other DNA
tagcgttctccttggaga

SEQ ID NO: 1577 - DNA, 18 bp, synthetic construct
  misc_feature 1..18: note = Synthetic
  source 1..18: mol_type = other DNA
ggtagcgttctccttgga

SEQ ID NO: 1578 - DNA, 18 bp, synthetic construct
  misc_feature 1..18: note = Synthetic
  source 1..18: mol_type = other DNA
gtggtagcgttctccttg

SEQ ID NO: 1579 - DNA, 18 bp, synthetic construct
  misc_feature 1..18: note = Synthetic
  source 1..18: mol_type = other DNA
ccgtggtagcgttctcct

SEQ ID NO: 1580 - DNA, 18 bp, synthetic construct
  misc_feature 1..18: note = Synthetic
  source 1..18: mol_type = other DNA
gtccgtggtagcgttctc

SEQ ID NO: 1581 - DNA, 18 bp, synthetic construct
  misc_feature 1..18: note = Synthetic
  source 1..18: mol_type = other DNA
aggtccgtggtagcgttc

SEQ ID NO: 1582 - DNA, 18 bp, synthetic construct
  misc_feature 1..18: note = Synthetic
  source 1..18: mol_type = other DNA
ggaggtccgtggtagcgt

SEQ ID NO: 1583 - DNA, 18 bp, synthetic construct
  misc_feature 1..18: note = Synthetic
  source 1..18: mol_type = other DNA
gaggaggtccgtggtagc

SEQ ID NO: 1584 - DNA, 18 bp, synthetic construct
  misc_feature 1..18: note = Synthetic
  source 1..18: mol_type = other DNA
gtgaggaggtccgtggta

SEQ ID NO: 1585 - DNA, 18 bp, synthetic construct
  misc_feature 1..18: note = Synthetic
  source 1..18: mol_type = other DNA
tagtgaggaggtccgtgg

SEQ ID NO: 1586 - DNA, 18 bp, synthetic construct
  misc_feature 1..18: note = Synthetic
  source 1..18: mol_type = other DNA
cttagtgaggaggtccgt

SEQ ID NO: 1587 - DNA, 18 bp, synthetic construct
  misc_feature 1..18: note = Synthetic
  source 1..18: mol_type = other DNA
agcttagtgaggaggtcc

SEQ ID NO: 1588 - DNA, 18 bp, synthetic construct
  misc_feature 1..18: note = Synthetic
  source 1..18: mol_type = other DNA
gcagcttagtgaggaggt

SEQ ID NO: 1589 - DNA, 18 bp, synthetic construct
  misc_feature 1..18: note = Synthetic
  source 1..18: mol_type = other DNA
aggcagcttagtgaggag

SEQ ID NO: 1590 - DNA, 18 bp, synthetic construct
  misc_feature 1..18: note = Synthetic
  source 1..18: mol_type = other DNA
gcaggcagcttagtgagg

SEQ ID NO: 1591 - DNA, 18 bp, synthetic construct
  misc_feature 1..18: note = Synthetic
  source 1..18: mol_type = other DNA
gcgcaggcagcttagtga

SEQ ID NO: 1592 - DNA, 18 bp, synthetic construct
  misc_feature 1..18: note = Synthetic
  source 1..18: mol_type = other DNA
gtgcgcaggcagcttagt

SEQ ID NO: 1593 - DNA, 18 bp, synthetic construct
  misc_feature 1..18: note = Synthetic
  source 1..18: mol_type = other DNA
gtgtgcgcaggcagctta

SEQ ID NO: 1594 - DNA, 18 bp, synthetic construct
  misc_feature 1..18: note = Synthetic
  source 1..18: mol_type = other DNA
ctgtgtgcgcaggcagct

SEQ ID NO: 1595 - DNA, 18 bp, synthetic construct
  misc_feature 1..18: note = Synthetic
  source 1..18: mol_type = other DNA
tgcaccctgcctctggta

SEQ ID NO: 1596 - DNA, 18 bp, synthetic construct
  misc_feature 1..18: note = Synthetic
  source 1..18: mol_type = other DNA
tctgcaccctgcctctgg

SEQ ID NO: 1597 - DNA, 18 bp, synthetic construct
  misc_feature 1..18: note = Synthetic
  source 1..18: mol_type = other DNA
tatctgcaccctgcctct

SEQ ID NO: 1598 - DNA, 18 bp, synthetic construct
  misc_feature 1..18: note = Synthetic
  source 1..18: mol_type = other DNA
tgtatctgcaccctgcct

SEQ ID NO: 1599 - DNA, 18 bp, synthetic construct
  misc_feature 1..18: note = Synthetic
  source 1..18: mol_type = other DNA
cctgtatctgcaccctgc

SEQ ID NO: 1600 - DNA, 18 bp, synthetic construct
  misc_feature 1..18: note = Synthetic
  source 1..18: mol_type = other DNA
cccctgtatctgcaccct

SEQ ID NO: 1601 - DNA, 18 bp, synthetic construct
  misc_feature 1..18: note = Synthetic
  source 1..18: mol_type = other DNA
cacccctgtatctgcacc

SEQ ID NO: 1602 - DNA, 18 bp, synthetic construct
  misc_feature 1..18: note = Synthetic
  source 1..18: mol_type = other DNA
cccacccctgtatctgca

SEQ ID NO: 1603 - DNA, 18 bp, synthetic construct
  misc_feature 1..18: note = Synthetic
  source 1..18: mol_type = other DNA
gccccacccctgtatctg

SEQ ID NO: 1604 - DNA, 18 bp, synthetic construct
  misc_feature 1..18: note = Synthetic
  source 1..18: mol_type = other DNA
gggccccacccctgtatc

SEQ ID NO: 1605 - DNA, 18 bp, synthetic construct
  misc_feature 1..18: note = Synthetic
  source 1..18: mol_type = other DNA
gggggccccacccctgta

SEQ ID NO: 1606 - DNA, 18 bp, synthetic construct
  misc_feature 1..18: note = Synthetic
  source 1..18: mol_type = other DNA
aagggggccccacccctg

SEQ ID NO: 1607 - DNA, 18 bp, synthetic construct
  misc_feature 1..18: note = Synthetic
  source 1..18: mol_type = other DNA
gaaagggggccccacccc

SEQ ID NO: 1608 - DNA, 18 bp, synthetic construct
  misc_feature 1..18: note = Synthetic
  source 1..18: mol_type = other DNA
aggaaagggggccccacc

SEQ ID NO: 1609 - DNA, 18 bp, synthetic construct
  misc_feature 1..18: note = Synthetic
  source 1..18: mol_type = other DNA
ggaggaaagggggcccca

SEQ ID NO: 1610 - DNA, 18 bp, synthetic construct
  misc_feature 1..18: note = Synthetic
  source 1..18: mol_type = other DNA
agggaggaaagggggccc

SEQ ID NO: 1611 - DNA, 18 bp, synthetic construct
  misc_feature 1..18: note = Synthetic
  source 1..18: mol_type = other DNA
aaagggaggaaagggggc

SEQ ID NO: 1612 - DNA, 18 bp, synthetic construct
  misc_feature 1..18: note = Synthetic
  source 1..18: mol_type = other DNA
taaaagggaggaaagggg

SEQ ID NO: 1613 - DNA, 18 bp, synthetic construct
  misc_feature 1..18: note = Synthetic
  source 1..18: mol_type = other DNA
cctaaaagggaggaaagg

SEQ ID NO: 1614 - DNA, 18 bp, synthetic construct
  misc_feature 1..18: note = Synthetic
  source 1..18: mol_type = other DNA
ggcctaaaagggaggaaa

SEQ ID NO: 1615 - DNA, 18 bp, synthetic construct
  misc_feature 1..18: note = Synthetic
  source 1..18: mol_type = other DNA
caggcctaaaagggagga

SEQ ID NO: 1616 - DNA, 18 bp, synthetic construct
  misc_feature 1..18: note = Synthetic
  source 1..18: mol_type = other DNA
gccaggcctaaaagggag

SEQ ID NO: 1617 - DNA, 18 bp, synthetic construct
  misc_feature 1..18: note = Synthetic
  source 1..18: mol_type = other DNA
aggccaggcctaaaaggg

SEQ ID NO: 1618 - DNA, 18 bp, synthetic construct
  misc_feature 1..18: note = Synthetic
  source 1..18: mol_type = other DNA
taaggccaggcctaaaag

SEQ ID NO: 1619 - DNA, 18 bp, synthetic construct
  misc_feature 1..18: note = Synthetic
  source 1..18: mol_type = other DNA
cctaaggccaggcctaaa

SEQ ID NO: 1620 - DNA, 18 bp, synthetic construct
  misc_feature 1..18: note = Synthetic
  source 1..18: mol_type = other DNA
atcctaaggccaggccta

SEQ ID NO: 1621 - DNA, 18 bp, synthetic construct
  misc_feature 1..18: note = Synthetic
  source 1..18: mol_type = other DNA
tgatcctaaggccaggcc

SEQ ID NO: 1622 - DNA, 18 bp, synthetic construct
  misc_feature 1..18: note = Synthetic
  source 1..18: mol_type = other DNA
agtgatcctaaggccagg

SEQ ID NO: 1623 - DNA, 18 bp, synthetic construct
  misc_feature 1..18: note = Synthetic
  source 1..18: mol_type = other DNA
gcagtgatcctaaggcca

SEQ ID NO: 1624 - DNA, 18 bp, synthetic construct
  misc_feature 1..18: note = Synthetic
  source 1..18: mol_type = other DNA
ttgcagtgatcctaaggc

SEQ ID NO: 1625 - DNA, 18 bp, synthetic construct
  misc_feature 1..18: note = Synthetic
  source 1..18: mol_type = other DNA
ccttgcagtgatcctaag

SEQ ID NO: 1626 - DNA, 18 bp, synthetic construct
  misc_feature 1..18: note = Synthetic
  source 1..18: mol_type = other DNA
caccttgcagtgatccta

SEQ ID NO: 1627 - DNA, 18 bp, synthetic construct
  misc_feature 1..18: note = Synthetic
  source 1..18: mol_type = other DNA
accaccttgcagtgatcc

SEQ ID NO: 1628 - DNA, 18 bp, synthetic construct
  misc_feature 1..18: note = Synthetic
  source 1..18: mol_type = other DNA
acaccaccttgcagtgat

SEQ ID NO: 1629 - DNA, 18 bp, synthetic construct
  misc_feature 1..18: note = Synthetic
  source 1..18: mol_type = other DNA
ggcactggggaccctcag

SEQ ID NO: 1630 - DNA, 18 bp, synthetic construct
  misc_feature 1..18: note = Synthetic
  source 1..18: mol_type = other DNA
gtggcactggggaccctc

SEQ ID NO: 1631 - DNA, 18 bp, synthetic construct
  misc_feature 1..18: note = Synthetic
  source 1..18: mol_type = other DNA
aagtggcactggggaccc

SEQ ID NO: 1632 - DNA, 18 bp, synthetic construct
  misc_feature 1..18: note = Synthetic
  source 1..18: mol_type = other DNA
agaagtggcactggggac

SEQ ID NO: 1633 - DNA, 18 bp, synthetic construct
  misc_feature 1..18: note = Synthetic
  source 1..18: mol_type = other DNA
tcagaagtggcactgggg

SEQ ID NO: 1634 - DNA, 18 bp, synthetic construct
  misc_feature 1..18: note = Synthetic
  source 1..18: mol_type = other DNA
ggtcagaagtggcactgg

SEQ ID NO: 1635 - DNA, 18 bp, synthetic construct
  misc_feature 1..18: note = Synthetic
  source 1..18: mol_type = other DNA
caggtcagaagtggcact

SEQ ID NO: 1636 - DNA, 18 bp, synthetic construct
  misc_feature 1..18: note = Synthetic
  source 1..18: mol_type = other DNA
gacaggtcagaagtggca

SEQ ID NO: 1637 - DNA, 18 bp, synthetic construct
  misc_feature 1..18: note = Synthetic
  source 1..18: mol_type = other DNA
aggacaggtcagaagtgg

SEQ ID NO: 1638 - DNA, 18 bp, synthetic construct
  misc_feature 1..18: note = Synthetic
  source 1..18: mol_type = other DNA
agaggacaggtcagaagt

SEQ ID NO: 1639 - DNA, 18 bp, synthetic construct
  misc_feature 1..18: note = Synthetic
  source 1..18: mol_type = other DNA
agagaggacaggtcagaa

SEQ ID NO: 1640 - DNA, 18 bp, synthetic construct
  misc_feature 1..18: note = Synthetic
  source 1..18: mol_type = other DNA
gcagagaggacaggtcag

SEQ ID NO: 1641 - DNA, 18 bp, synthetic construct
  misc_feature 1..18: note = Synthetic
  source 1..18: mol_type = other DNA
aagcagagaggacaggtc

SEQ ID NO: 1642 - DNA, 18 bp, synthetic construct
  misc_feature 1..18: note = Synthetic
  source 1..18: mol_type = other DNA
ggaagcagagaggacagg

SEQ ID NO: 1643 - DNA, 18 bp, synthetic construct
  misc_feature 1..18: note = Synthetic
  source 1..18: mol_type = other DNA
agggaagcagagaggaca

SEQ ID NO: 1644 - DNA, 18 bp, synthetic construct
  misc_feature 1..18: note = Synthetic
  source 1..18: mol_type = other DNA
tgagggaagcagagagga

SEQ ID NO: 1645 - DNA, 18 bp, synthetic construct
  misc_feature 1..18: note = Synthetic
  source 1..18: mol_type = other DNA
tgtgagggaagcagagag

SEQ ID NO: 1646 - DNA, 18 bp, synthetic construct
  misc_feature 1..18: note = Synthetic
  source 1..18: mol_type = other DNA
cacatttcacatccccca

SEQ ID NO: 1647 - DNA, 18 bp, synthetic construct
  misc_feature 1..18: note = Synthetic
  source 1..18: mol_type = other DNA
gtcacatttcacatcccc

SEQ ID NO: 1648 - DNA, 18 bp, synthetic construct
  misc_feature 1..18: note = Synthetic
  source 1..18: mol_type = other DNA
atgtcacatttcacatcc

SEQ ID NO: 1649 - DNA, 18 bp, synthetic construct
  misc_feature 1..18: note = Synthetic
  source 1..18: mol_type = other DNA
ccatgtcacatttcacat

SEQ ID NO: 1650 - DNA, 18 bp, synthetic construct
  misc_feature 1..18: note = Synthetic
  source 1..18: mol_type = other DNA
ctccatgtcacatttcac

SEQ ID NO: 1651 - DNA, 18 bp, synthetic construct
  misc_feature 1..18: note = Synthetic
  source 1..18: mol_type = other DNA
acctccatgtcacatttc

SEQ ID NO: 1652 - DNA, 18 bp, synthetic construct
  misc_feature 1..18: note = Synthetic
  source 1..18: mol_type = other DNA
tcacctccatgtcacatt

SEQ ID NO: 1653 - DNA, 18 bp, synthetic construct
  misc_feature 1..18: note = Synthetic
  source 1..18: mol_type = other DNA
gctcacctccatgtcaca

SEQ ID NO: 1654 - DNA, 18 bp, synthetic construct
  misc_feature 1..18: note = Synthetic
  source 1..18: mol_type = other DNA
cagctcacctccatgtca

SEQ ID NO: 1655 - DNA, 18 bp, synthetic construct
  misc_feature 1..18: note = Synthetic
  source 1..18: mol_type = other DNA
ggcagctcacctccatgt

SEQ ID NO: 1656 - DNA, 18 bp, synthetic construct
  misc_feature 1..18: note = Synthetic
  source 1..18: mol_type = other DNA
tgggcagctcacctccat

SEQ ID NO: 1657 - DNA, 18 bp, synthetic construct
  misc_feature 1..18: note = Synthetic
  source 1..18: mol_type = other DNA
tctgggcagctcacctcc

SEQ ID NO: 1658 - DNA, 18 bp, synthetic construct
  misc_feature 1..18: note = Synthetic
  source 1..18: mol_type = other DNA
catctgggcagctcacct

SEQ ID NO: 1659 - DNA, 18 bp, synthetic construct
  misc_feature 1..18: note = Synthetic
  source 1..18: mol_type = other DNA
gccatctgggcagctcac

SEQ ID NO: 1660 - DNA, 18 bp, synthetic construct
  misc_feature 1..18: note = Synthetic
  source 1..18: mol_type = other DNA
tagccatctgggcagctc

SEQ ID NO: 1661 - DNA, 18 bp, synthetic construct
  misc_feature 1..18: note = Synthetic
  source 1..18: mol_type = other DNA
tatagccatctgggcagc

SEQ ID NO: 1662 - DNA, 18 bp, synthetic construct
  misc_feature 1..18: note = Synthetic
  source 1..18: mol_type = other DNA
ggtatagccatctgggca

SEQ ID NO: 1663 - DNA, 18 bp, synthetic construct
  misc_feature 1..18: note = Synthetic
  source 1..18: mol_type = other DNA
caggtatagccatctggg

SEQ ID NO: 1664 - DNA, 18 bp, synthetic construct
  misc_feature 1..18: note = Synthetic
  source 1..18: mol_type = other DNA
agcaggtatagccatctg

SEQ ID NO: 1665 - DNA, 18 bp, synthetic construct
  misc_feature 1..18: note = Synthetic
  source 1..18: mol_type = other DNA
gcagcaggtatagccatc

SEQ ID NO: 1666 - DNA, 18 bp, synthetic construct
  misc_feature 1..18: note = Synthetic
  source 1..18: mol_type = other DNA
cggcagcaggtatagcca

SEQ ID NO: 1667 - DNA, 18 bp, synthetic construct
  misc_feature 1..18: note = Synthetic
  source 1..18: mol_type = other DNA
gacggcagcaggtatagc

SEQ ID NO: 1668 - DNA, 18 bp, synthetic construct
  misc_feature 1..18: note = Synthetic
  source 1..18: mol_type = other DNA
tagacggcagcaggtata

SEQ ID NO: 1669 - DNA, 18 bp, synthetic construct
  misc_feature 1..18: note = Synthetic
  source 1..18: mol_type = other DNA
tgtagacggcagcaggta

SEQ ID NO: 1670 - DNA, 18 bp, synthetic construct
  misc_feature 1..18: note = Synthetic
  source 1..18: mol_type = other DNA
actgtagacggcagcagg

SEQ ID NO: 1671 - DNA, 18 bp, synthetic construct
  misc_feature 1..18: note = Synthetic
  source 1..18: mol_type = other DNA
cgactgtagacggcagca

SEQ ID NO: 1672 - DNA, 18 bp, synthetic construct
  misc_feature 1..18: note = Synthetic
  source 1..18: mol_type = other DNA
cccgactgtagacggcag

SEQ ID NO: 1673 - DNA, 18 bp, synthetic construct
  misc_feature 1..18: note = Synthetic
  source 1..18: mol_type = other DNA
cccccgactgtagacggc

SEQ ID NO: 1674 - DNA, 18 bp, synthetic construct
  misc_feature 1..18: note = Synthetic
  source 1..18: mol_type = other DNA
ggcccccgactgtagacg

SEQ ID NO: 1675 - DNA, 18 bp, synthetic construct
  misc_feature 1..18: note = Synthetic
  source 1..18: mol_type = other DNA
caggcccccgactgtaga

SEQ ID NO: 1676 - DNA, 18 bp, synthetic construct
  misc_feature 1..18: note = Synthetic
  source 1..18: mol_type = other DNA
cccaggcccccgactgta

SEQ ID NO: 1677 - DNA, 18 bp, synthetic construct
  misc_feature 1..18: note = Synthetic
  source 1..18: mol_type = other DNA
gccccaggcccccgactg

SEQ ID NO: 1678 - DNA, 18 bp, synthetic construct
  misc_feature 1..18: note = Synthetic
  source 1..18: mol_type = other DNA
cagccccaggcccccgac

SEQ ID NO: 1679 - DNA, 18 bp, synthetic construct
  misc_feature 1..18: note = Synthetic
  source 1..18: mol_type = other DNA
agcagccccaggcccccg

SEQ ID NO: 1680 - DNA, 18 bp, synthetic construct
  misc_feature 1..18: note = Synthetic
  source 1..18: mol_type = other DNA
gcagcagccccaggcccc

SEQ ID NO: 1681 - DNA, 18 bp, synthetic construct
  misc_feature 1..18: note = Synthetic
  source 1..18: mol_type = other DNA
gggcagcagccccaggcc

SEQ ID NO: 1682 - DNA, 18 bp, synthetic construct
  misc_feature 1..18: note = Synthetic
  source 1..18: mol_type = other DNA
aagggcagcagccccagg

SEQ ID NO: 1683 - DNA, 18 bp, synthetic construct
  misc_feature 1..18: note = Synthetic
  source 1..18: mol_type = other DNA
aaaagggcagcagcccca

SEQ ID NO: 1684 - DNA, 18 bp, synthetic construct
  misc_feature 1..18: note = Synthetic
  source 1..18: mol_type = other DNA
gtaaaagggcagcagccc

SEQ ID NO: 1685 - DNA, 18 bp, synthetic construct
  misc_feature 1..18: note = Synthetic
  source 1..18: mol_type = other DNA
gggtaaaagggcagcagc

SEQ ID NO: 1686 - DNA, 18 bp, synthetic construct
  misc_feature 1..18: note = Synthetic
  source 1..18: mol_type = other DNA
ctgggtaaaagggcagca

SEQ ID NO: 1687 - DNA, 18 bp, synthetic construct
  misc_feature 1..18: note = Synthetic
  source 1..18: mol_type = other DNA
acctgggtaaaagggcag

SEQ ID NO: 1688 - DNA, 18 bp, synthetic construct
  misc_feature 1..18: note = Synthetic
  source 1..18: mol_type = other DNA
gtacctgggtaaaagggc

SEQ ID NO: 1689 - DNA, 18 bp, synthetic construct
  misc_feature 1..18: note = Synthetic
  source 1..18: mol_type = other DNA
gggtacctgggtaaaagg

SEQ ID NO: 1690 - DNA, 18 bp, synthetic construct
  misc_feature 1..18: note = Synthetic
  source 1..18: mol_type = other DNA
ctgggtacctgggtaaaa

SEQ ID NO: 1691 - DNA, 18 bp, synthetic construct
  misc_feature 1..18: note = Synthetic
  source 1..18: mol_type = other DNA
ccctgggtacctgggtaa

SEQ ID NO: 1692 - DNA, 18 bp, synthetic construct
  misc_feature 1..18: note = Synthetic
  source 1..18: mol_type = other DNA
acccctgggtacctgggt

SEQ ID NO: 1693 - DNA, 18 bp, synthetic construct
  misc_feature 1..18: note = Synthetic
  source 1..18: mol_type = other DNA
ccacccctgggtacctgg

SEQ ID NO: 1694 - DNA, 18 bp, synthetic construct
  misc_feature 1..18: note = Synthetic
  source 1..18: mol_type = other DNA
cgccacccctgggtacct

SEQ ID NO: 1695 - DNA, 18 bp, synthetic construct
  misc_feature 1..18: note = Synthetic
  source 1..18: mol_type = other DNA
cccgccacccctgggtac

SEQ ID NO: 1696 - DNA, 18 bp, synthetic construct
  misc_feature 1..18: note = Synthetic
  source 1..18: mol_type = other DNA
cacccgccacccctgggt

SEQ ID NO: 1697 - DNA, 18 bp, synthetic construct
  misc_feature 1..18: note = Synthetic
  source 1..18: mol_type = other DNA
cccacccgccacccctgg

SEQ ID NO: 1698 - DNA, 18 bp, synthetic construct
  misc_feature 1..18: note = Synthetic
  source 1..18: mol_type = other DNA
cacccacccgccacccct

SEQ ID NO: 1699 - DNA, 18 bp, synthetic construct
  misc_feature 1..18: note = Synthetic
  source 1..18: mol_type = other DNA
cccacccacccgccaccc

SEQ ID NO: 1700 - DNA, 18 bp, synthetic construct
  misc_feature 1..18: note = Synthetic
  source 1..18: mol_type = other DNA
agcccacccacccgccac

SEQ ID NO: 1701 - DNA, 18 bp, synthetic construct
  misc_feature 1..18: note = Synthetic
  source 1..18: mol_type = other DNA
tcagcccacccacccgcc

SEQ ID NO: 1702 - DNA, 18 bp, synthetic construct
  misc_feature 1..18: note = Synthetic
  source 1..18: mol_type = other DNA
gctcagcccacccacccg

SEQ ID NO: 1703 - DNA, 18 bp, synthetic construct
  misc_feature 1..18: note = Synthetic
  source 1..18: mol_type = other DNA
gtgctcagcccacccacc

SEQ ID NO: 1704 - DNA, 18 bp, synthetic construct
  misc_feature 1..18: note = Synthetic
  source 1..18: mol_type = other DNA
ctgtgctcagcccaccca

SEQ ID NO: 1705 - DNA, 18 bp, synthetic construct
  misc_feature 1..18: note = Synthetic
  source 1..18: mol_type = other DNA
cactgtgctcagcccacc

SEQ ID NO: 1706 - DNA, 18 bp, synthetic construct
  misc_feature 1..18: note = Synthetic
  source 1..18: mol_type = other DNA
cacactgtgctcagccca

SEQ ID NO: 1707 - DNA, 18 bp, synthetic construct
  misc_feature 1..18: note = Synthetic
  source 1..18: mol_type = other DNA
gccacactgtgctcagcc

SEQ ID NO: 1708 - DNA, 18 bp, synthetic construct
  misc_feature 1..18: note = Synthetic
  source 1..18: mol_type = other DNA
ctgccacactgtgctcag

SEQ ID NO: 1709 - DNA, 18 bp, synthetic construct
  misc_feature 1..18: note = Synthetic
  source 1..18: mol_type = other DNA
gcctgccacactgtgctc

SEQ ID NO: 1710 - DNA, 18 bp, synthetic construct
  misc_feature 1..18: note = Synthetic
  source 1..18: mol_type = other DNA
ctgcctgccacactgtgc

SEQ ID NO: 1711 - DNA, 18 bp, synthetic construct
  misc_feature 1..18: note = Synthetic
  source 1..18: mol_type = other DNA
ggctgcctgccacactgt

SEQ ID NO: 1712 - DNA, 18 bp, synthetic construct
  misc_feature 1..18: note = Synthetic
  source 1..18: mol_type = other DNA
gggcccggctgcctgcca

SEQ ID NO: 1713 - DNA, 18 bp, synthetic construct
  misc_feature 1..18: note = Synthetic
  source 1..18: mol_type = other DNA
tggggcccggctgcctgc

SEQ ID NO: 1714 - DNA, 18 bp, synthetic construct
  misc_feature 1..18: note = Synthetic
  source 1..18: mol_type = other DNA
actggggcccggctgcct

SEQ ID NO: 1715 - DNA, 18 bp, synthetic construct
  misc_feature 1..18: note = Synthetic
  source 1..18: mol_type = other DNA
gcactggggcccggctgc

SEQ ID NO: 1716 - DNA, 18 bp, synthetic construct
  misc_feature 1..18: note = Synthetic
  source 1..18: mol_type = other DNA
gggcactggggcccggct

SEQ ID NO: 1717 - DNA, 18 bp, synthetic construct
  misc_feature 1..18: note = Synthetic
  source 1..18: mol_type = other DNA
gtgggcactggggcccgg

SEQ ID NO: 1718 - DNA, 18 bp, synthetic construct
  misc_feature 1..18: note = Synthetic
  source 1..18: mol_type = other DNA
aggtgggcactggggccc

SEQ ID NO: 1719 - DNA, 18 bp, synthetic construct
  misc_feature 1..18: note = Synthetic
  source 1..18: mol_type = other DNA
gcaggtgggcactggggc

SEQ ID NO: 1720 - DNA, 18 bp, synthetic construct
  misc_feature 1..18: note = Synthetic
  source 1..18: mol_type = other DNA
gggcaggtgggcactggg

SEQ ID NO: 1721 - DNA, 18 bp, synthetic construct
  misc_feature 1..18: note = Synthetic
  source 1..18: mol_type = other DNA
aagggcaggtgggcactg

SEQ ID NO: 1722 - DNA, 18 bp, synthetic construct
  misc_feature 1..18: note = Synthetic
  source 1..18: mol_type = other DNA
agaagggcaggtgggcac

SEQ ID NO: 1723 - DNA, 18 bp, synthetic construct
  misc_feature 1..18: note = Synthetic
  source 1..18: mol_type = other DNA
gaagaagggcaggtgggc

SEQ ID NO: 1724 - DNA, 18 bp, synthetic construct
  misc_feature 1..18: note = Synthetic
  source 1..18: mol_type = other DNA
atgaagaagggcaggtgg

SEQ ID NO: 1725 - DNA, 18 bp, synthetic construct
  misc_feature 1..18: note = Synthetic
  source 1..18: mol_type = other DNA
agatgaagaagggcaggt

SEQ ID NO: 1726 - DNA, 18 bp, synthetic construct
  misc_feature 1..18: note = Synthetic
  source 1..18: mol_type = other DNA
gcagatgaagaagggcag

SEQ ID NO: 1727 - DNA, 18 bp, synthetic construct
  misc_feature 1..18: note = Synthetic
  source 1..18: mol_type = other DNA
gggcagatgaagaagggc

SEQ ID NO: 1728 - DNA, 18 bp, synthetic construct
  misc_feature 1..18: note = Synthetic
  source 1..18: mol_type = other DNA
tagggcagatgaagaagg

SEQ ID NO: 1729 - DNA, 18 bp, synthetic construct
  misc_feature 1..18: note = Synthetic
  source 1..18: mol_type = other DNA
gtcctcacagcacacagc

SEQ ID NO: 1730 - DNA, 18 bp, synthetic construct
  misc_feature 1..18: note = Synthetic
  source 1..18: mol_type = other DNA
tggtcctcacagcacaca

SEQ ID NO: 1731 - DNA, 18 bp, synthetic construct
  misc_feature 1..18: note = Synthetic
  source 1..18: mol_type = other DNA
tgtggtcctcacagcaca

SEQ ID NO: 1732 - DNA, 18 bp, synthetic construct
  misc_feature 1..18: note = Synthetic
  source 1..18: mol_type = other DNA
tatgtggtcctcacagca

SEQ ID NO: 1733 - DNA, 18 bp, synthetic construct
  misc_feature 1..18: note = Synthetic
  source 1..18: mol_type = other DNA
tgtatgtggtcctcacag

SEQ ID NO: 1734 - DNA, 18 bp, synthetic construct
  misc_feature 1..18: note = Synthetic
  source 1..18: mol_type = other DNA
agtgtatgtggtcctcac

SEQ ID NO: 1735 - DNA, 18 bp, synthetic construct
  misc_feature 1..18: note = Synthetic
  source 1..18: mol_type = other DNA
gcagtgtatgtggtcctc

SEQ ID NO: 1736 - DNA, 18 bp, synthetic construct
  misc_feature 1..18: note = Synthetic
  source 1..18: mol_type = other DNA
cagcagtgtatgtggtcc

SEQ ID NO: 1737 - DNA, 18 bp, synthetic construct
  misc_feature 1..18: note = Synthetic
  source 1..18: mol_type = other DNA
gacagcagtgtatgtggt

SEQ ID NO: 1738 - DNA, 18 bp, synthetic construct
  misc_feature 1..18: note = Synthetic
  source 1..18: mol_type = other DNA
gggacagcagtgtatgtg

SEQ ID NO: 1739 - DNA, 18 bp, synthetic construct
  misc_feature 1..18: note = Synthetic
  source 1..18: mol_type = other DNA
gcgggacagcagtgtatg

SEQ ID NO: 1740 - DNA, 18 bp, synthetic construct
  misc_feature 1..18: note = Synthetic
  source 1..18: mol_type = other DNA
ccgcgggacagcagtgta

SEQ ID NO: 1741 - DNA, 18 bp, synthetic construct
  misc_feature 1..18: note = Synthetic
  source 1..18: mol_type = other DNA
ccccgcgggacagcagtg

SEQ ID NO: 1742 - DNA, 18 bp, synthetic construct
  misc_feature 1..18: note = Synthetic
  source 1..18: mol_type = other DNA
aaccccgcgggacagcag

SEQ ID NO: 1743 - DNA, 18 bp, synthetic construct
  misc_feature 1..18: note = Synthetic
  source 1..18: mol_type = other DNA
taaaccccgcgggacagc

SEQ ID NO: 1744 - DNA, 18 bp, synthetic construct
  misc_feature 1..18: note = Synthetic
  source 1..18: mol_type = other DNA
cgtaaaccccgcgggaca

SEQ ID NO: 1745 - DNA, 18 bp, synthetic construct
  misc_feature 1..18: note = Synthetic
  source 1..18: mol_type = other DNA
cacgtaaaccccgcggga

SEQ ID NO: 1746 - DNA, 18 bp, synthetic construct
  misc_feature 1..18: note = Synthetic
  source 1..18: mol_type = other DNA
cacacgtaaaccccgcgg

SEQ ID NO: 1747 - DNA, 18 bp, synthetic construct
  misc_feature 1..18: note = Synthetic
  source 1..18: mol_type = other DNA
gtcacacgtaaaccccgc

SEQ ID NO: 1748 - DNA, 18 bp, synthetic construct
  misc_feature 1..18: note = Synthetic
  source 1..18: mol_type = other DNA
gtgtcacacgtaaacccc

SEQ ID NO: 1749 - DNA, 18 bp, synthetic construct
  misc_feature 1..18: note = Synthetic
  source 1..18: mol_type = other DNA
gcgtgtcacacgtaaacc

SEQ ID NO: 1750 - DNA, 18 bp, synthetic construct
  misc_feature 1..18: note = Synthetic
  source 1..18: mol_type = other DNA
ctgcgtgtcacacgtaaa

SEQ ID NO: 1751 - DNA, 18 bp, synthetic construct
  misc_feature 1..18: note = Synthetic
  source 1..18: mol_type = other DNA
ttctgcgtgtcacacgta

SEQ ID NO: 1752 - DNA, 18 bp, synthetic construct
  misc_feature 1..18: note = Synthetic
  source 1..18: mol_type = other DNA
ccttctgcgtgtcacacg

SEQ ID NO: 1753 - DNA, 18 bp, synthetic construct
  misc_feature 1..18: note = Synthetic
  source 1..18: mol_type = other DNA
acccttctgcgtgtcaca

SEQ ID NO: 1754 - DNA, 18 bp, synthetic construct
  misc_feature 1..18: note = Synthetic
  source 1..18: mol_type = other DNA
gtacccttctgcgtgtca

SEQ ID NO: 1755 - DNA, 18 bp, synthetic construct
  misc_feature 1..18: note = Synthetic
  source 1..18: mol_type = other DNA
aggtacccttctgcgtgt

SEQ ID NO: 1756 - DNA, 18 bp, synthetic construct
  misc_feature 1..18: note = Synthetic
  source 1..18: mol_type = other DNA
acaggtacccttctgcgt

SEQ ID NO: 1757 - DNA, 18 bp, synthetic construct
  misc_feature 1..18: note = Synthetic
  source 1..18: mol_type = other DNA
tcacaggtacccttctgc

SEQ ID NO: 1758 - DNA, 18 bp, synthetic construct
  misc_feature 1..18: note = Synthetic
  source 1..18: mol_type = other DNA
gttcacaggtacccttct

SEQ ID NO: 1759 - DNA, 18 bp, synthetic construct
  misc_feature 1..18: note = Synthetic
  source 1..18: mol_type = other DNA
ctgttcacaggtaccctt

SEQ ID NO: 1760 - DNA, 18 bp, synthetic construct
  misc_feature 1..18: note = Synthetic
  source 1..18: mol_type = other DNA
ccctgttcacaggtaccc

SEQ ID NO: 1761 - DNA, 18 bp, synthetic construct
  misc_feature 1..18: note = Synthetic
  source 1..18: mol_type = other DNA
gcccctgttcacaggtac

SEQ ID NO: 1762 - DNA, 18 bp, synthetic construct
  misc_feature 1..18: note = Synthetic
  source 1..18: mol_type = other DNA
gggcccctgttcacaggt

SEQ ID NO: 1763 - DNA, 18 bp, synthetic construct
  misc_feature 1..18: note = Synthetic
  source 1..18: mol_type = other DNA
tggggcccctgttcacag

SEQ ID NO: 1764 - DNA, 18 bp, synthetic construct
  misc_feature 1..18: note = Synthetic
  source 1..18: mol_type = other DNA
ggtggggcccctgttcac

SEQ ID NO: 1765 - DNA, 18 bp, synthetic construct
  misc_feature 1..18: note = Synthetic
  source 1..18: mol_type = other DNA
ctggtggggcccctgttc

SEQ ID NO: 1766 - DNA, 18 bp, synthetic construct
  misc_feature 1..18: note = Synthetic
  source 1..18: mol_type = other DNA
acctggtggggcccctgt

SEQ ID NO: 1767 - DNA, 18 bp, synthetic construct
  misc_feature 1..18: note = Synthetic
  source 1..18: mol_type = other DNA
gcacctggtggggcccct

SEQ ID NO: 1768 - DNA, 18 bp, synthetic construct
  misc_feature 1..18: note = Synthetic
  source 1..18: mol_type = other DNA
gggcacctggtggggccc

SEQ ID NO: 1769 - DNA, 18 bp, synthetic construct
  misc_feature 1..18: note = Synthetic
  source 1..18: mol_type = other DNA
cagggcacctggtggggc

SEQ ID NO: 1770 - DNA, 18 bp, synthetic construct
  misc_feature 1..18: note = Synthetic
  source 1..18: mol_type = other DNA
tccagggcacctggtggg

SEQ ID NO: 1771 - DNA, 18 bp, synthetic construct
  misc_feature 1..18: note = Synthetic
  source 1..18: mol_type = other DNA
catccagggcacctggtg

SEQ ID NO: 1772 - DNA, 18 bp, synthetic construct
  misc_feature 1..18: note = Synthetic
  source 1..18: mol_type = other DNA
tccatccagggcacctgg

SEQ ID NO: 1773 - DNA, 18 bp, synthetic construct
  misc_feature 1..18: note = Synthetic
  source 1..18: mol_type = other DNA
tctccatccagggcacct

SEQ ID NO: 1774 - DNA, 18 bp, synthetic construct
  misc_feature 1..18: note = Synthetic
  source 1..18: mol_type = other DNA
cttctccatccagggcac

SEQ ID NO: 1775 - DNA, 18 bp, synthetic construct
  misc_feature 1..18: note = Synthetic
  source 1..18: mol_type = other DNA
gccttctccatccagggc

SEQ ID NO: 1776 - DNA, 18 bp, synthetic construct
  misc_feature 1..18: note = Synthetic
  source 1..18: mol_type = other DNA
gggccttctccatccagg

SEQ ID NO: 1777 - DNA, 18 bp, synthetic construct
  misc_feature 1..18: note = Synthetic
  source 1..18: mol_type = other DNA
tggggccttctccatcca

SEQ ID NO: 1778 - DNA, 18 bp, synthetic construct
  misc_feature 1..18: note = Synthetic
  source 1..18: mol_type = other DNA
gctggggccttctccatc

SEQ ID NO: 1779 - DNA, 18 bp, synthetic construct
  misc_feature 1..18: note = Synthetic
  source 1..18: mol_type = other DNA
gagctggggccttctcca

SEQ ID NO: 1780 - DNA, 18 bp, synthetic construct
  misc_feature 1..18: note = Synthetic
  source 1..18: mol_type = other DNA
gtgagctggggccttctc

SEQ ID NO: 1781 - DNA, 18 bp, synthetic construct
  misc_feature 1..18: note = Synthetic
  source 1..18: mol_type = other DNA
aggtgagctggggccttc

SEQ ID NO: 1782 - DNA, 18 bp, synthetic construct
  misc_feature 1..18: note = Synthetic
  source 1..18: mol_type = other DNA
tgaggtgagctggggcct

SEQ ID NO: 1783 - DNA, 18 bp, synthetic construct
  misc_feature 1..18: note = Synthetic
  source 1..18: mol_type = other DNA
gctgaggtgagctggggc

SEQ ID NO: 1784 - DNA, 18 bp, synthetic construct
  misc_feature 1..18: note = Synthetic
  source 1..18: mol_type = other DNA
aggctgaggtgagctggg

SEQ ID NO: 1785 - DNA, 18 bp, synthetic construct
  misc_feature 1..18: note = Synthetic
  source 1..18: mol_type = other DNA
gcaggctgaggtgagctg

SEQ ID NO: 1786 - DNA, 18 bp, synthetic construct
  misc_feature 1..18: note = Synthetic
  source 1..18: mol_type = other DNA
tggcaggctgaggtgagc

SEQ ID NO: 1787 - DNA, 18 bp, synthetic construct
  misc_feature 1..18: note = Synthetic
  source 1..18: mol_type = other DNA
tctggcaggctgaggtga

SEQ ID NO: 1788 - DNA, 18 bp, synthetic construct
  misc_feature 1..18: note = Synthetic
  source 1..18: mol_type = other DNA
ggtctggcaggctgaggt

SEQ ID NO: 1789 - DNA, 18 bp, synthetic construct
  misc_feature 1..18: note = Synthetic
  source 1..18: mol_type = other DNA
tgggtctggcaggctgag

SEQ ID NO: 1790 - DNA, 18 bp, synthetic construct
  misc_feature 1..18: note = Synthetic
  source 1..18: mol_type = other DNA
tgtgggtctggcaggctg

SEQ ID NO: 1791 - DNA, 18 bp, synthetic construct
  misc_feature 1..18: note = Synthetic
  source 1..18: mol_type = other DNA
cttgtgggtctggcaggc

SEQ ID NO: 1792 - DNA, 18 bp, synthetic construct
  misc_feature 1..18: note = Synthetic
  source 1..18: mol_type = other DNA
ggcttgtgggtctggcag

SEQ ID NO: 1793 - DNA, 18 bp, synthetic construct
  misc_feature 1..18: note = Synthetic
  source 1..18: mol_type = other DNA
aaggcttgtgggtctggc

SEQ ID NO: 1794 - DNA, 18 bp, synthetic construct
  misc_feature 1..18: note = Synthetic
  source 1..18: mol_type = other DNA
tcaaggcttgtgggtctg

SEQ ID NO: 1795 - DNA, 18 bp, synthetic construct
  misc_feature 1..18: note = Synthetic
  source 1..18: mol_type = other DNA
cttcaaggcttgtgggtc

SEQ ID NO: 1796 - DNA, 18 bp, synthetic construct
  misc_feature 1..18: note = Synthetic
  source 1..18: mol_type = other DNA
ctcttcaaggcttgtggg

SEQ ID NO: 1797 - DNA, 18 bp, synthetic construct
  misc_feature 1..18: note = Synthetic
  source 1..18: mol_type = other DNA
ctctcttcaaggcttgtg

SEQ ID NO: 1798 - DNA, 18 bp, synthetic construct
  misc_feature 1..18: note = Synthetic
  source 1..18: mol_type = other DNA
atctctcttcaaggcttg

SEQ ID NO: 1799 - DNA, 18 bp, synthetic construct
  misc_feature 1..18: note = Synthetic
  source 1..18: mol_type = other DNA
acatctctcttcaaggct

SEQ ID NO: 1800 - DNA, 18 bp, synthetic construct
  misc_feature 1..18: note = Synthetic
  source 1..18: mol_type = other DNA
ggacatctctcttcaagg

SEQ ID NO: 1801 - DNA, 18 bp, synthetic construct
  misc_feature 1..18: note = Synthetic
  source 1..18: mol_type = other DNA
ggggacatctctcttcaa

SEQ ID NO: 1802 - DNA, 18 bp, synthetic construct
  misc_feature 1..18: note = Synthetic
  source 1..18: mol_type = other DNA
caggggacatctctcttc

SEQ ID NO: 1803 - DNA, 18 bp, synthetic construct
  misc_feature 1..18: note = Synthetic
  source 1..18: mol_type = other DNA
cacaggggacatctctct

SEQ ID NO: 1804 - DNA, 18 bp, synthetic construct
  misc_feature 1..18: note = Synthetic
  source 1..18: mol_type = other DNA
atcacaggggacatctct

SEQ ID NO: 1805 - DNA, 18 bp, synthetic construct
  misc_feature 1..18: note = Synthetic
  source 1..18: mol_type = other DNA
ttatcacaggggacatct

SEQ ID NO: 1806 - DNA, 18 bp, synthetic construct
  misc_feature 1..18: note = Synthetic
  source 1..18: mol_type = other DNA
cattatcacaggggacat

SEQ ID NO: 1807 - DNA, 18 bp, synthetic construct
  misc_feature 1..18: note = Synthetic
  source 1..18: mol_type = other DNA
gacattatcacaggggac

SEQ ID NO: 1808 - DNA, 18 bp, synthetic construct
  misc_feature 1..18: note = Synthetic
  source 1..18: mol_type = other DNA
ctgacattatcacagggg

SEQ ID NO: 1809 - DNA, 18 bp, synthetic construct
  misc_feature 1..18: note = Synthetic
  source 1..18: mol_type = other DNA
tgctgacattatcacagg

SEQ ID NO: 1810 - DNA, 18 bp, synthetic construct
  misc_feature 1..18: note = Synthetic
  source 1..18: mol_type = other DNA
gctgctgacattatcaca

SEQ ID NO: 1811 - DNA, 18 bp, synthetic construct
  misc_feature 1..18: note = Synthetic
  source 1..18: mol_type = other DNA
cagctgctgacattatca

SEQ ID NO: 1812 - DNA, 18 bp, synthetic construct
  misc_feature 1..18: note = Synthetic
  source 1..18: mol_type = other DNA
gacagctgctgacattat

SEQ ID NO: 1813 - DNA, 18 bp, synthetic construct
  misc_feature 1..18: note = Synthetic
  source 1..18: mol_type = other DNA
gggacagctgctgacatt

SEQ ID NO: 1814 - DNA, 18 bp, synthetic construct
  misc_feature 1..18: note = Synthetic
  source 1..18: mol_type = other DNA
gagggacagctgctgaca

SEQ ID NO: 1815 - DNA, 18 bp, synthetic construct
  misc_feature 1..18: note = Synthetic
  source 1..18: mol_type = other DNA
aggagggacagctgctga

SEQ ID NO: 1816 - DNA, 18 bp, synthetic construct
  misc_feature 1..18: note = Synthetic
  source 1..18: mol_type = other DNA
ggaggagggacagctgct

SEQ ID NO: 1817 - DNA, 18 bp, synthetic construct
  misc_feature 1..18: note = Synthetic
  source 1..18: mol_type = other DNA
tcggaggagggacagctg

SEQ ID NO: 1818 - DNA, 18 bp, synthetic construct
  misc_feature 1..18: note = Synthetic
  source 1..18: mol_type = other DNA
tatcggaggagggacagc

SEQ ID NO: 1819 - DNA, 18 bp, synthetic construct
  misc_feature 1..18: note = Synthetic
  source 1..18: mol_type = other DNA
ggtatcggaggagggaca

SEQ ID NO: 1820 - DNA, 18 bp, synthetic construct
  misc_feature 1..18: note = Synthetic
  source 1..18: mol_type = other DNA
caggtatcggaggaggga

SEQ ID NO: 1821 - DNA, 18 bp, synthetic construct
  misc_feature 1..18: note = Synthetic
  source 1..18: mol_type = other DNA
agcaggtatcggaggagg

SEQ ID NO: 1822 - DNA, 18 bp, synthetic construct
  misc_feature 1..18: note = Synthetic
  source 1..18: mol_type = other DNA
gcagcaggtatcggagga

SEQ ID NO: 1823 - DNA, 18 bp, synthetic construct
  misc_feature 1..18: note = Synthetic
  source 1..18: mol_type = other DNA
tggcagcaggtatcggag

SEQ ID NO: 1824 - DNA, 18 bp, synthetic construct
  misc_feature 1..18: note = Synthetic
  source 1..18: mol_type = other DNA
gttggcagcaggtatcgg

SEQ ID NO: 1825 - DNA, 18 bp, synthetic construct
  misc_feature 1..18: note = Synthetic
  source 1..18: mol_type = other DNA
gagttggcagcaggtatc

SEQ ID NO: 1826 - DNA, 18 bp, synthetic construct
  misc_feature 1..18: note = Synthetic
  source 1..18: mol_type = other DNA
gtgagttggcagcaggta

SEQ ID NO: 1827 - DNA, 18 bp, synthetic construct
  misc_feature 1..18: note = Synthetic
  source 1..18: mol_type = other DNA
acgtgagttggcagcagg

SEQ ID NO: 1828 - DNA, 18 bp, synthetic construct
  misc_feature 1..18: note = Synthetic
  source 1..18: mol_type = other DNA
agacgtgagttggcagca

SEQ ID NO: 1829 - DNA, 18 bp, synthetic construct
  misc_feature 1..18: note = Synthetic
  source 1..18: mol_type = other DNA
ccagacgtgagttggcag

SEQ ID NO: 1830 - DNA, 18 bp, synthetic construct
  misc_feature 1..18: note = Synthetic
  source 1..18: mol_type = other DNA
ccccagacgtgagttggc

SEQ ID NO: 1831 - DNA, 18 bp, synthetic construct
  misc_feature 1..18: note = Synthetic
  source 1..18: mol_type = other DNA
ctccccagacgtgagttg

SEQ ID NO: 1832 - DNA, 18 bp, synthetic construct
  misc_feature 1..18: note = Synthetic
  source 1..18: mol_type = other DNA
cactccccagacgtgagt

SEQ ID NO: 1833 - DNA, 18 bp, synthetic construct
  misc_feature 1..18: note = Synthetic
  source 1..18: mol_type = other DNA
cccactccccagacgtga

SEQ ID NO: 1834 - DNA, 18 bp, synthetic construct
  misc_feature 1..18: note = Synthetic
  source 1..18: mol_type = other DNA
gccccactccccagacgt

SEQ ID NO: 1835 - DNA, 18 bp, synthetic construct
  misc_feature 1..18: note = Synthetic
  source 1..18: mol_type = other DNA
cagccccactccccagac

SEQ ID NO: 1836 - DNA, 18 bp, synthetic construct
  misc_feature 1..18: note = Synthetic
  source 1..18: mol_type = other DNA
agcagccccactccccag

SEQ ID NO: 1837 - DNA, 18 bp, synthetic construct
  misc_feature 1..18: note = Synthetic
  source 1..18: mol_type = other DNA
acagcagccccactcccc

SEQ ID NO: 1838 - DNA, 18 bp, synthetic construct
  misc_feature 1..18: note = Synthetic
  source 1..18: mol_type = other DNA
ggacagcagccccactcc

SEQ ID NO: 1839 - DNA, 18 bp, synthetic construct
  misc_feature 1..18: note = Synthetic
  source 1..18: mol_type = other DNA
ttggacagcagccccact

SEQ ID NO: 1840 - DNA, 18 bp, synthetic construct
  misc_feature 1..18: note = Synthetic
  source 1..18: mol_type = other DNA
gattggacagcagcccca

SEQ ID NO: 1841 - DNA, 18 bp, synthetic construct
  misc_feature 1..18: note = Synthetic
  source 1..18: mol_type = other DNA
gggattggacagcagccc

SEQ ID NO: 1842 - DNA, 18 bp, synthetic construct
  misc_feature 1..18: note = Synthetic
  source 1..18: mol_type = other DNA
ctgggattggacagcagc

SEQ ID NO: 1843 - DNA, 18 bp, synthetic construct
  misc_feature 1..18: note = Synthetic
  source 1..18: mol_type = other DNA
ctctgggattggacagca

SEQ ID NO: 1844 - DNA, 18 bp, synthetic construct
  misc_feature 1..18: note = Synthetic
  source 1..18: mol_type = other DNA
gctgtcccctcccatata

SEQ ID NO: 1845 - DNA, 18 bp, synthetic construct
  misc_feature 1..18: note = Synthetic
  source 1..18: mol_type = other DNA
atgctgtcccctcccata

SEQ ID NO: 1846 - DNA, 18 bp, synthetic construct
  misc_feature 1..18: note = Synthetic
  source 1..18: mol_type = other DNA
agatgctgtcccctccca

SEQ ID NO: 1847 - DNA, 18 bp, synthetic construct
  misc_feature 1..18: note = Synthetic
  source 1..18: mol_type = other DNA
caagatgctgtcccctcc

SEQ ID NO: 1848 - DNA, 18 bp, synthetic construct
  misc_feature 1..18: note = Synthetic
  source 1..18: mol_type = other DNA
gccaagatgctgtcccct

SEQ ID NO: 1849 - DNA, 18 bp, synthetic construct
  misc_feature 1..18: note = Synthetic
  source 1..18: mol_type = other DNA
aggccaagatgctgtccc

SEQ ID NO: 1850 - DNA, 18 bp, synthetic construct
  misc_feature 1..18: note = Synthetic
  source 1..18: mol_type = other DNA
ccaggccaagatgctgtc

SEQ ID NO: 1851 - DNA, 18 bp, synthetic construct
  misc_feature 1..18: note = Synthetic
  source 1..18: mol_type = other DNA
gcccaggccaagatgctg

SEQ ID NO: 1852 - DNA, 18 bp, synthetic construct
  misc_feature 1..18: note = Synthetic
  source 1..18: mol_type = other DNA
ctgcccaggccaagatgc

SEQ ID NO: 1853 - DNA, 18 bp, synthetic construct
  misc_feature 1..18: note = Synthetic
  source 1..18: mol_type = other DNA
acctgcccaggccaagat

SEQ ID NO: 1854 - DNA, 18 bp, synthetic construct
  misc_feature 1..18: note = Synthetic
  source 1..18: mol_type = other DNA
ccacctgcccaggccaag

SEQ ID NO: 1855 - DNA, 18 bp, synthetic construct
  misc_feature 1..18: note = Synthetic
  source 1..18: mol_type = other DNA
acccacctgcccaggcca

SEQ ID NO: 1856 - DNA, 18 bp, synthetic construct
  misc_feature 1..18: note = Synthetic
  source 1..18: mol_type = other DNA
ccacccacctgcccaggc

SEQ ID NO: 1857 - DNA, 18 bp, synthetic construct
  misc_feature 1..18: note = Synthetic
  source 1..18: mol_type = other DNA
ggccacccacctgcccag

SEQ ID NO: 1858 - DNA, 18 bp, synthetic construct
  misc_feature 1..18: note = Synthetic
  source 1..18: mol_type = other DNA
ttggccacccacctgccc

SEQ ID NO: 1859 - DNA, 18 bp, synthetic construct
  misc_feature 1..18: note = Synthetic
  source 1..18: mol_type = other DNA
gcttggccacccacctgc

SEQ ID NO: 1860 - DNA, 18 bp, synthetic construct
  misc_feature 1..18: note = Synthetic
  source 1..18: mol_type = other DNA
gagcttggccacccacct

SEQ ID NO: 1861 - DNA, 18 bp, synthetic construct
  misc_feature 1..18: note = Synthetic
  source 1..18: mol_type = other DNA
agccactatgtggggcgc

SEQ ID NO: 1862 - DNA, 18 bp, synthetic construct
  misc_feature 1..18: note = Synthetic
  source 1..18: mol_type = other DNA
gtagccactatgtggggc

SEQ ID NO: 1863 - DNA, 18 bp, synthetic construct
  misc_feature 1..18: note = Synthetic
  source 1..18: mol_type = other DNA
aggtagccactatgtggg

SEQ ID NO: 1864 - DNA, 18 bp, synthetic construct
  misc_feature 1..18: note = Synthetic
  source 1..18: mol_type = other DNA
gtaggtagccactatgtg

SEQ ID NO: 1865 - DNA, 18 bp, synthetic construct
  misc_feature 1..18: note = Synthetic
  source 1..18: mol_type = other DNA
ttgtaggtagccactatg

SEQ ID NO: 1866 - DNA, 18 bp, synthetic construct
  misc_feature 1..18: note = Synthetic
  source 1..18: mol_type = other DNA
cgttgtaggtagccacta

SEQ ID NO: 1867 - DNA, 18 bp, synthetic construct
  misc_feature 1..18: note = Synthetic
  source 1..18: mol_type = other DNA
ggcgttgtaggtagccac

SEQ ID NO: 1868 - DNA, 18 bp, synthetic construct
  misc_feature 1..18: note = Synthetic
  source 1..18: mol_type = other DNA
agggcgttgtaggtagcc

SEQ ID NO: 1869 - DNA, 18 bp, synthetic construct
  misc_feature 1..18: note = Synthetic
  source 1..18: mol_type = other DNA
aaagggcgttgtaggtag

SEQ ID NO: 1870 - DNA, 18 bp, synthetic construct
  misc_feature 1..18: note = Synthetic
  source 1..18: mol_type = other DNA
ggaaagggcgttgtaggt

SEQ ID NO: 1871 - DNA, 18 bp, synthetic construct
  misc_feature 1..18: note = Synthetic
  source 1..18: mol_type = other DNA
caggaaagggcgttgtag

SEQ ID NO: 1872 - DNA, 18 bp, synthetic construct
  misc_feature 1..18: note = Synthetic
  source 1..18: mol_type = other DNA
ggcaggaaagggcgttgt

SEQ ID NO: 1873 - DNA, 18 bp, synthetic construct
  misc_feature 1..18: note = Synthetic
  source 1..18: mol_type = other DNA
tgggcaggaaagggcgtt

SEQ ID NO: 1874 - DNA, 18 bp, synthetic construct
  misc_feature 1..18: note = Synthetic
  source 1..18: mol_type = other DNA
ggtgggcaggaaagggcg

SEQ ID NO: 1875 - DNA, 18 bp, synthetic construct
  misc_feature 1..18: note = Synthetic
  source 1..18: mol_type = other DNA
ggggtgggcaggaaaggg

SEQ ID NO: 1876 - DNA, 18 bp, synthetic construct
  misc_feature 1..18: note = Synthetic
  source 1..18: mol_type = other DNA
ggggggtgggcaggaaag

SEQ ID NO: 1877 - DNA, 18 bp, synthetic construct
  misc_feature 1..18: note = Synthetic
  source 1..18: mol_type = other DNA
ctggggggtgggcaggaa

SEQ ID NO: 1878 - DNA, 18 bp, synthetic construct
  misc_feature 1..18: note = Synthetic
  source 1..18: mol_type = other DNA
ggtccgagcagcagacag

SEQ ID NO: 1879 - DNA, 18 bp, synthetic construct
  misc_feature 1..18: note = Synthetic
  source 1..18: mol_type = other DNA
gtggtccgagcagcagac

SEQ ID NO: 1880 - DNA, 18 bp, synthetic construct
  misc_feature 1..18: note = Synthetic
  source 1..18: mol_type = other DNA
tggtggtccgagcagcag

SEQ ID NO: 1881 - DNA, 18 bp, synthetic construct
  misc_feature 1..18: note = Synthetic
  source 1..18: mol_type = other DNA
gctggtggtccgagcagc

SEQ ID NO: 1882 - DNA, 18 bp, synthetic construct
  misc_feature 1..18: note = Synthetic
  source 1..18: mol_type = other DNA
gtgctggtggtccgagca

SEQ ID NO: 1883 - DNA, 18 bp, synthetic construct
  misc_feature 1..18: note = Synthetic
  source 1..18: mol_type = other DNA
cagtgctggtggtccgag

SEQ ID NO: 1884 - DNA, 18 bp, synthetic construct
  misc_feature 1..18: note = Synthetic
  source 1..18: mol_type = other DNA
agcagtgctggtggtccg

SEQ ID NO: 1885 - DNA, 18 bp, synthetic construct
  misc_feature 1..18: note = Synthetic
  source 1..18: mol_type = other DNA
gcagcagtgctggtggtc

SEQ ID NO: 1886 - DNA, 18 bp, synthetic construct
  misc_feature 1..18: note = Synthetic
  source 1..18: mol_type = other DNA
gggcagcagtgctggtgg

SEQ ID NO: 1887 - DNA, 18 bp, synthetic construct
  misc_feature 1..18: note = Synthetic
  source 1..18: mol_type = other DNA
gggggcagcagtgctggt

SEQ ID NO: 1888 - DNA, 18 bp, synthetic construct
  misc_feature 1..18: note = Synthetic
  source 1..18: mol_type = other DNA
ctgggggcagcagtgctg

SEQ ID NO: 1889 - DNA, 18 bp, synthetic construct
  misc_feature 1..18: note = Synthetic
  source 1..18: mol_type = other DNA
ccctgggggcagcagtgc

SEQ ID NO: 1890 - DNA, 18 bp, synthetic construct
  misc_feature 1..18: note = Synthetic
  source 1..18: mol_type = other DNA
agccctgggggcagcagt

SEQ ID NO: 1891 - DNA, 18 bp, synthetic construct
  misc_feature 1..18: note = Synthetic
  source 1..18: mol_type = other DNA
gtagccctgggggcagca

SEQ ID NO: 1892 - DNA, 18 bp, synthetic construct
  misc_feature 1..18: note = Synthetic
  source 1..18: mol_type = other DNA
gtgtagccctgggggcag

SEQ ID NO: 1893 - DNA, 18 bp, synthetic construct
  misc_feature 1..18: note = Synthetic
  source 1..18: mol_type = other DNA
acgtgtagccctgggggc

SEQ ID NO: 1894 - DNA, 18 bp, synthetic construct
  misc_feature 1..18: note = Synthetic
  source 1..18: mol_type = other DNA
acacgtgtagccctgggg

SEQ ID NO: 1895 - DNA, 18 bp, synthetic construct
  misc_feature 1..18: note = Synthetic
  source 1..18: mol_type = other DNA
acacacgtgtagccctgg

SEQ ID NO: 1896 - DNA, 18 bp, synthetic construct
  misc_feature 1..18: note = Synthetic
  source 1..18: mol_type = other DNA
ctacacacgtgtagccct

SEQ ID NO: 1897 - DNA, 18 bp, synthetic construct
  misc_feature 1..18: note = Synthetic
  source 1..18: mol_type = other DNA
agctacacacgtgtagcc

SEQ ID NO: 1898 - DNA, 18 bp, synthetic construct
  misc_feature 1..18: note = Synthetic
  source 1..18: mol_type = other DNA
tcagctacacacgtgtag

SEQ ID NO: 1899 - DNA, 18 bp, synthetic construct
  misc_feature 1..18: note = Synthetic
  source 1..18: mol_type = other DNA
cctcagctacacacgtgt

SEQ ID NO: 1900 - DNA, 18 bp, synthetic construct
  misc_feature 1..18: note = Synthetic
  source 1..18: mol_type = other DNA
cccctcagctacacacgt

SEQ ID NO: 1901 - DNA, 18 bp, synthetic construct
  misc_feature 1..18: note = Synthetic
  source 1..18: mol_type = other DNA
tgcccctcagctacacac

SEQ ID NO: 1902 - DNA, 18 bp, synthetic construct
  misc_feature 1..18: note = Synthetic
  source 1..18: mol_type = other DNA
actgcccctcagctacac

SEQ ID NO: 1903 - DNA, 18 bp, synthetic construct
  misc_feature 1..18: note = Synthetic
  source 1..18: mol_type = other DNA
acactgcccctcagctac

SEQ ID NO: 1904 - DNA, 18 bp, synthetic construct
  misc_feature 1..18: note = Synthetic
  source 1..18: mol_type = other DNA
tgacactgcccctcagct

SEQ ID NO: 1905 - DNA, 18 bp, synthetic construct
  misc_feature 1..18: note = Synthetic
  source 1..18: mol_type = other DNA
gctgacactgcccctcag

SEQ ID NO: 1906 - DNA, 18 bp, synthetic construct
  misc_feature 1..18: note = Synthetic
  source 1..18: mol_type = other DNA
tcgctgacactgcccctc

SEQ ID NO: 1907 - DNA, 18 bp, synthetic construct
  misc_feature 1..18: note = Synthetic
  source 1..18: mol_type = other DNA
cctcgctgacactgcccc

SEQ ID NO: 1908 - DNA, 18 bp, synthetic construct
  misc_feature 1..18: note = Synthetic
  source 1..18: mol_type = other DNA
ttcctcgctgacactgcc

SEQ ID NO: 1909 - DNA, 18 bp, synthetic construct
  misc_feature 1..18: note = Synthetic
  source 1..18: mol_type = other DNA
gcttcctcgctgacactg

SEQ ID NO: 1910 - DNA, 18 bp, synthetic construct
  misc_feature 1..18: note = Synthetic
  source 1..18: mol_type = other DNA
tcgcttcctcgctgacac

SEQ ID NO: 1911 - DNA, 18 bp, synthetic construct
  misc_feature 1..18: note = Synthetic
  source 1..18: mol_type = other DNA
tctcgcttcctcgctgac

SEQ ID NO: 1912 - DNA, 18 bp, synthetic construct
  misc_feature 1..18: note = Synthetic
  source 1..18: mol_type = other DNA
gatctcgcttcctcgctg

SEQ ID NO: 1913 - DNA, 18 bp, synthetic construct
  misc_feature 1..18: note = Synthetic
  source 1..18: mol_type = other DNA
acgatctcgcttcctcgc

SEQ ID NO: 1914 - DNA, 18 bp, synthetic construct
  misc_feature 1..18: note = Synthetic
  source 1..18: mol_type = other DNA
ccacgatctcgcttcctc

SEQ ID NO: 1915 - DNA, 18 bp, synthetic construct
  misc_feature 1..18: note = Synthetic
  source 1..18: mol_type = other DNA
agccacgatctcgcttcc

SEQ ID NO: 1916 - DNA, 18 bp, synthetic construct
  misc_feature 1..18: note = Synthetic
  source 1..18: mol_type = other DNA
ccagccacgatctcgctt

SEQ ID NO: 1917 - DNA, 18 bp, synthetic construct
  misc_feature 1..18: note = Synthetic
  source 1..18: mol_type = other DNA
gtccagccacgatctcgc

SEQ ID NO: 1918 - DNA, 18 bp, synthetic construct
  misc_feature 1..18: note = Synthetic
  source 1..18: mol_type = other DNA
cagtccagccacgatctc

SEQ ID NO: 1919 - DNA, 18 bp, synthetic construct
  misc_feature 1..18: note = Synthetic
  source 1..18: mol_type = other DNA
tccagtccagccacgatc

SEQ ID NO: 1920 - DNA, 18 bp, synthetic construct
  misc_feature 1..18: note = Synthetic
  source 1..18: mol_type = other DNA
tctccagtccagccacga

SEQ ID NO: 1921 - DNA, 18 bp, synthetic construct
  misc_feature 1..18: note = Synthetic
  source 1..18: mol_type = other DNA
cttctccagtccagccac

SEQ ID NO: 1922 - DNA, 18 bp, synthetic construct
  misc_feature 1..18: note = Synthetic
  source 1..18: mol_type = other DNA
atcttctccagtccagcc

SEQ ID NO: 1923 - DNA, 18 bp, synthetic construct
  misc_feature 1..18: note = Synthetic
  source 1..18: mol_type = other DNA
gcatcttctccagtccag

SEQ ID NO: 1924 - DNA, 18 bp, synthetic construct
  misc_feature 1..18: note = Synthetic
  source 1..18: mol_type = other DNA
aggcatcttctccagtcc

SEQ ID NO: 1925 - DNA, 18 bp, synthetic construct
  misc_feature 1..18: note = Synthetic
  source 1..18: mol_type = other DNA
gcaggcatcttctccagt

SEQ ID NO: 1926 - DNA, 18 bp, synthetic construct
  misc_feature 1..18: note = Synthetic
  source 1..18: mol_type = other DNA
gggcaggcatcttctcca

SEQ ID NO: 1927 - DNA, 18 bp, synthetic construct
  misc_feature 1..18: note = Synthetic
  source 1..18: mol_type = other DNA
gcgggcaggcatcttctc

SEQ ID NO: 1928 - DNA, 18 bp, synthetic construct
  misc_feature 1..18: note = Synthetic
  source 1..18: mol_type = other DNA
cggcgggcaggcatcttc

SEQ ID NO: 1929 - DNA, 18 bp, synthetic construct
  misc_feature 1..18: note = Synthetic
  source 1..18: mol_type = other DNA
cccggcgggcaggcatct

SEQ ID NO: 1930 - DNA, 18 bp, synthetic construct
  misc_feature 1..18: note = Synthetic
  source 1..18: mol_type = other DNA
agcccggcgggcaggcat

SEQ ID NO: 1931 - DNA, 18 bp, synthetic construct
  misc_feature 1..18: note = Synthetic
  source 1..18: mol_type = other DNA
gaagcccggcgggcaggc

SEQ ID NO: 1932 - DNA, 18 bp, synthetic construct
  misc_feature 1..18: note = Synthetic
  source 1..18: mol_type = other DNA
aggaagcccggcgggcag

SEQ ID NO: 1933 - DNA, 18 bp, synthetic construct
  misc_feature 1..18: note = Synthetic
  source 1..18: mol_type = other DNA
taaggaagcccggcgggc

SEQ ID NO: 1934 - DNA, 18 bp, synthetic construct
  misc_feature 1..18: note = Synthetic
  source 1..18: mol_type = other DNA
gataaggaagcccggcgg

SEQ ID NO: 1935 - DNA, 18 bp, synthetic construct
  misc_feature 1..18: note = Synthetic
  source 1..18: mol_type = other DNA
gggataaggaagcccggc

SEQ ID NO: 1936 - DNA, 18 bp, synthetic construct
  misc_feature 1..18: note = Synthetic
  source 1..18: mol_type = other DNA
gtgggataaggaagcccg

SEQ ID NO: 1937 - DNA, 18 bp, synthetic construct
  misc_feature 1..18: note = Synthetic
  source 1..18: mol_type = other DNA
gggtgggataaggaagcc

SEQ ID NO: 1938 - DNA, 18 bp, synthetic construct
  misc_feature 1..18: note = Synthetic
  source 1..18: mol_type = other DNA
tggggtgggataaggaag

SEQ ID NO: 1939 - DNA, 18 bp, synthetic construct
  misc_feature 1..18: note = Synthetic
  source 1..18: mol_type = other DNA
tctggggtgggataagga

SEQ ID NO: 1940 - DNA, 18 bp, synthetic construct
  misc_feature 1..18: note = Synthetic
  source 1..18: mol_type = other DNA
tctctggggtgggataag

SEQ ID NO: 1941 - DNA, 18 bp, synthetic construct
  misc_feature 1..18: note = Synthetic
  source 1..18: mol_type = other DNA
tgtctctggggtgggata

SEQ ID NO: 1942 - DNA, 18 bp, synthetic construct
  misc_feature 1..18: note = Synthetic
  source 1..18: mol_type = other DNA
gatgtctctggggtggga

SEQ ID NO: 1943 - DNA, 18 bp, synthetic construct
  misc_feature 1..18: note = Synthetic
  source 1..18: mol_type = other DNA
ccgatgtctctggggtgg

SEQ ID NO: 1944 - DNA, 18 bp, synthetic construct
  misc_feature 1..18: note = Synthetic
  source 1..18: mol_type = other DNA
agccgatgtctctggggt

SEQ ID NO: 1945 - DNA, 18 bp, synthetic construct
  misc_feature 1..18: note = Synthetic
  source 1..18: mol_type = other DNA
acagccgatgtctctggg

SEQ ID NO: 1946 - DNA, 18 bp, synthetic construct
  misc_feature 1..18: note = Synthetic
  source 1..18: mol_type = other DNA
tcacagccgatgtctctg

SEQ ID NO: 1947 - DNA, 18 bp, synthetic construct
  misc_feature 1..18: note = Synthetic
  source 1..18: mol_type = other DNA
ggtcacagccgatgtctc

SEQ ID NO: 1948 - DNA, 18 bp, synthetic construct
  misc_feature 1..18: note = Synthetic
  source 1..18: mol_type = other DNA
ctggtcacagccgatgtc

SEQ ID NO: 1949 - DNA, 18 bp, synthetic construct
  misc_feature 1..18: note = Synthetic
  source 1..18: mol_type = other DNA
tgctggtcacagccgatg

SEQ ID NO: 1950 - DNA, 18 bp, synthetic construct
  misc_feature 1..18: note = Synthetic
  source 1..18: mol_type = other DNA
tgtgctggtcacagccga

SEQ ID NO: 1951 - DNA, 18 bp, synthetic construct
  misc_feature 1..18: note = Synthetic
  source 1..18: mol_type = other DNA
ggtgtgctggtcacagcc

SEQ ID NO: 1952 - DNA, 18 bp, synthetic construct
  misc_feature 1..18: note = Synthetic
  source 1..18: mol_type = other DNA
ctggtgtgctggtcacag

SEQ ID NO: 1953 - DNA, 18 bp, synthetic construct
  misc_feature 1..18: note = Synthetic
  source 1..18: mol_type = other DNA
agctggtgtgctggtcac

SEQ ID NO: 1954 - DNA, 18 bp, synthetic construct
  misc_feature 1..18: note = Synthetic
  source 1..18: mol_type = other DNA
gcagctggtgtgctggtc

SEQ ID NO: 1955 - DNA, 18 bp, synthetic construct
  misc_feature 1..18: note = Synthetic
  source 1..18: mol_type = other DNA
gggcagctggtgtgctgg

SEQ ID NO: 1956 - DNA, 18 bp, synthetic construct
  misc_feature 1..18: note = Synthetic
  source 1..18: mol_type = other DNA
ccgggcagctggtgtgct

SEQ ID NO: 1957 - DNA, 18 bp, synthetic construct
  misc_feature 1..18: note = Synthetic
  source 1..18: mol_type = other DNA
caccgggcagctggtgtg

SEQ ID NO: 1958 - DNA, 18 bp, synthetic construct
  misc_feature 1..18: note = Synthetic
  source 1..18: mol_type = other DNA
cccaccgggcagctggtg

SEQ ID NO: 1959 - DNA, 18 bp, synthetic construct
  misc_feature 1..18: note = Synthetic
  source 1..18: mol_type = other DNA
gccccaccgggcagctgg

SEQ ID NO: 1960 - DNA, 18 bp, synthetic construct
  misc_feature 1..18: note = Synthetic
  source 1..18: mol_type = other DNA
ctgccccaccgggcagct

SEQ ID NO: 1961 - DNA, 18 bp, synthetic construct
  misc_feature 1..18: note = Synthetic
  source 1..18: mol_type = other DNA
gtctgccccaccgggcag

SEQ ID NO: 1962 - DNA, 18 bp, synthetic construct
  misc_feature 1..18: note = Synthetic
  source 1..18: mol_type = other DNA
aggtctgccccaccgggc

SEQ ID NO: 1963 - DNA, 18 bp, synthetic construct
  misc_feature 1..18: note = Synthetic
  source 1..18: mol_type = other DNA
gcaggtctgccccaccgg

SEQ ID NO: 1964 - DNA, 18 bp, synthetic construct
  misc_feature 1..18: note = Synthetic
  source 1..18: mol_type = other DNA
cagcaggtctgccccacc

SEQ ID NO: 1965 - DNA, 18 bp, synthetic construct
  misc_feature 1..18: note = Synthetic
  source 1..18: mol_type = other DNA
ggcagcaggtctgcccca

SEQ ID NO: 1966 - DNA, 18 bp, synthetic construct
  misc_feature 1..18: note = Synthetic
  source 1..18: mol_type = other DNA
cgggcagcaggtctgccc

SEQ ID NO: 1967 - DNA, 18 bp, synthetic construct
  misc_feature 1..18: note = Synthetic
  source 1..18: mol_type = other DNA
ctcgggcagcaggtctgc

SEQ ID NO: 1968 - DNA, 18 bp, synthetic construct
  misc_feature 1..18: note = Synthetic
  source 1..18: mol_type = other DNA
ggctcgggcagcaggtct

SEQ ID NO: 1969 - DNA, 18 bp, synthetic construct
  misc_feature 1..18: note = Synthetic
  source 1..18: mol_type = other DNA
caggctcgggcagcaggt

SEQ ID NO: 1970 - DNA, 18 bp, synthetic construct
  misc_feature 1..18: note = Synthetic
  source 1..18: mol_type = other DNA
cccaggctcgggcagcag

SEQ ID NO: 1971 - DNA, 18 bp, synthetic construct
  misc_feature 1..18: note = Synthetic
  source 1..18: mol_type = other DNA
cacccaggctcgggcagc

SEQ ID NO: 1972 - DNA, 18 bp, synthetic construct
  misc_feature 1..18: note = Synthetic
  source 1..18: mol_type = other DNA
cccacccaggctcgggca

SEQ ID NO: 1973 - DNA, 18 bp, synthetic construct
  misc_feature 1..18: note = Synthetic
  source 1..18: mol_type = other DNA
ctcccacccaggctcggg

SEQ ID NO: 1974 - DNA, 18 bp, synthetic construct
  misc_feature 1..18: note = Synthetic
  source 1..18: mol_type = other DNA
agctcccacccaggctcg

SEQ ID NO: 1975 - DNA, 18 bp, synthetic construct
  misc_feature 1..18: note = Synthetic
  source 1..18: mol_type = other DNA
ccagctcccacccaggct

SEQ ID NO: 1976 - DNA, 18 bp, synthetic construct
  misc_feature 1..18: note = Synthetic
  source 1..18: mol_type = other DNA
gcccagctcccacccagg

SEQ ID NO: 1977 - DNA, 18 bp, synthetic construct
  misc_feature 1..18: note = Synthetic
  source 1..18: mol_type = other DNA
aggcccagctcccaccca

SEQ ID NO: 1978 - DNA, 18 bp, synthetic construct
  misc_feature 1..18: note = Synthetic
  source 1..18: mol_type = other DNA
gcaggcccagctcccacc

SEQ ID NO: 1979 - DNA, 18 bp, synthetic construct
  misc_feature 1..18: note = Synthetic
  source 1..18: mol_type = other DNA
cagcaggcccagctccca

SEQ ID NO: 1980 - DNA, 18 bp, synthetic construct
  misc_feature 1..18: note = Synthetic
  source 1..18: mol_type = other DNA
ggcagcaggcccagctcc

SEQ ID NO: 1981 - DNA, 18 bp, synthetic construct
  misc_feature 1..18: note = Synthetic
  source 1..18: mol_type = other DNA
ctggcagcaggcccagct

SEQ ID NO: 1982 - DNA, 18 bp, synthetic construct
  misc_feature 1..18: note = Synthetic
  source 1..18: mol_type = other DNA
aactggcagcaggcccag

SEQ ID NO: 1983 - DNA, 18 bp, synthetic construct
  misc_feature 1..18: note = Synthetic
  source 1..18: mol_type = other DNA
gcaactggcagcaggccc

SEQ ID NO: 1984 - DNA, 18 bp, synthetic construct
  misc_feature 1..18: note = Synthetic
  source 1..18: mol_type = other DNA
gggcaactggcagcaggc

SEQ ID NO: 1985 - DNA, 18 bp, synthetic construct
  misc_feature 1..18: note = Synthetic
  source 1..18: mol_type = other DNA
tggggcaactggcagcag

SEQ ID NO: 1986 - DNA, 18 bp, synthetic construct
  misc_feature 1..18: note = Synthetic
  source 1..18: mol_type = other DNA
catggggcaactggcagc

SEQ ID NO: 1987 - DNA, 18 bp, synthetic construct
  misc_feature 1..18: note = Synthetic
  source 1..18: mol_type = other DNA
cacatggggcaactggca

SEQ ID NO: 1988 - DNA, 18 bp, synthetic construct
  misc_feature 1..18: note = Synthetic
  source 1..18: mol_type = other DNA
ctcacatggggcaactgg

SEQ ID NO: 1989 - DNA, 18 bp, synthetic construct
  misc_feature 1..18: note = Synthetic
  source 1..18: mol_type = other DNA
cactcacatggggcaact

SEQ ID NO: 1990 - DNA, 18 bp, synthetic construct
  misc_feature 1..18: note = Synthetic
  source 1..18: mol_type = other DNA
ggcactcacatggggcaa

SEQ ID NO: 1991 - DNA, 18 bp, synthetic construct
  misc_feature 1..18: note = Synthetic
  source 1..18: mol_type = other DNA
gaggcactcacatggggc

SEQ ID NO: 1992 - DNA, 18 bp, synthetic construct
  misc_feature 1..18: note = Synthetic
  source 1..18: mol_type = other DNA
gggaggcactcacatggg

SEQ ID NO: 1993 - DNA, 18 bp, synthetic construct
  misc_feature 1..18: note = Synthetic
  source 1..18: mol_type = other DNA
cagggaggcactcacatg

SEQ ID NO: 1994 - DNA, 18 bp, synthetic construct
  misc_feature 1..18: note = Synthetic
  source 1..18: mol_type = other DNA
ggcagggaggcactcaca

SEQ ID NO: 1995 - DNA, 18 bp, synthetic construct
  misc_feature 1..18: note = Synthetic
  source 1..18: mol_type = other DNA
caggcagggaggcactca

SEQ ID NO: 1996 - DNA, 18 bp, synthetic construct
  misc_feature 1..18: note = Synthetic
  source 1..18: mol_type = other DNA
ggcaggcagggaggcact

SEQ ID NO: 1997 - DNA, 18 bp, synthetic construct
  misc_feature 1..18: note = Synthetic
  source 1..18: mol_type = other DNA
ggggcaggcagggaggca

SEQ ID NO: 1998 - DNA, 18 bp, synthetic construct
  misc_feature 1..18: note = Synthetic
  source 1..18: mol_type = other DNA
caggggcaggcagggagg

SEQ ID NO: 1999 - DNA, 18 bp, synthetic construct
  misc_feature 1..18: note = Synthetic
  source 1..18: mol_type = other DNA
tccaggggcaggcaggga

SEQ ID NO: 2000 - DNA, 18 bp, synthetic construct
  misc_feature 1..18: note = Synthetic
  source 1..18: mol_type = other DNA
tatccaggggcaggcagg

SEQ ID NO: 2001 - DNA, 18 bp, synthetic construct
  misc_feature 1..18: note = Synthetic
  source 1..18: mol_type = other DNA
cctatccaggggcaggca

SEQ ID NO: 2002 - DNA, 18 bp, synthetic construct
  misc_feature 1..18: note = Synthetic
  source 1..18: mol_type = other DNA
cccctatccaggggcagg

SEQ ID NO: 2003 - DNA, 18 bp, synthetic construct
  misc_feature 1..18: note = Synthetic
  source 1..18: mol_type = other DNA
ctcccctatccaggggca

SEQ ID NO: 2004 - DNA, 18 bp, synthetic construct
  misc_feature 1..18: note = Synthetic
  source 1..18: mol_type = other DNA
agctcccctatccagggg

SEQ ID NO: 2005 - DNA, 18 bp, synthetic construct
  misc_feature 1..18: note = Synthetic
  source 1..18: mol_type = other DNA
ttagctcccctatccagg

SEQ ID NO: 2006 - DNA, 18 bp, synthetic construct
  misc_feature 1..18: note = Synthetic
  source 1..18: mol_type = other DNA
gcttagctcccctatcca

SEQ ID NO: 2007 - DNA, 18 bp, synthetic construct
  misc_feature 1..18: note = Synthetic
  source 1..18: mol_type = other DNA
gggcttagctcccctatc

SEQ ID NO: 2008 - DNA, 18 bp, synthetic construct
  misc_feature 1..18: note = Synthetic
  source 1..18: mol_type = other DNA
ctgggcttagctccccta

SEQ ID NO: 2009 - DNA, 18 bp, synthetic construct
  misc_feature 1..18: note = Synthetic
  source 1..18: mol_type = other DNA
cactgggcttagctcccc

SEQ ID NO: 2010 - DNA, 18 bp, synthetic construct
  misc_feature 1..18: note = Synthetic
  source 1..18: mol_type = other DNA
ctcactgggcttagctcc

SEQ ID NO: 2011 - DNA, 18 bp, synthetic construct
  misc_feature 1..18: note = Synthetic
  source 1..18: mol_type = other DNA
ccctcactgggcttagct

SEQ ID NO: 2012 - DNA, 18 bp, synthetic construct
  misc_feature 1..18: note = Synthetic
  source 1..18: mol_type = other DNA
gttcctgtcccctcactg

SEQ ID NO: 2013 - DNA, 18 bp, synthetic construct
  misc_feature 1..18: note = Synthetic
  source 1..18: mol_type = other DNA
atgttcctgtcccctcac

SEQ ID NO: 2014 - DNA, 18 bp, synthetic construct
  misc_feature 1..18: note = Synthetic
  source 1..18: mol_type = other DNA
ttatgttcctgtcccctc

SEQ ID NO: 2015 - DNA, 18 bp, synthetic construct
  misc_feature 1..18: note = Synthetic
  source 1..18: mol_type = other DNA
cattatgttcctgtcccc

SEQ ID NO: 2016 - DNA, 18 bp, synthetic construct
  misc_feature 1..18: note = Synthetic
  source 1..18: mol_type = other DNA
ggcattatgttcctgtcc

SEQ ID NO: 2017 - DNA, 18 bp, synthetic construct
  misc_feature 1..18: note = Synthetic
  source 1..18: mol_type = other DNA
atggcattatgttcctgt

SEQ ID NO: 2018 - DNA, 18 bp, synthetic construct
  misc_feature 1..18: note = Synthetic
  source 1..18: mol_type = other DNA
gaatggcattatgttcct

SEQ ID NO: 2019 - DNA, 18 bp, synthetic construct
  misc_feature 1..18: note = Synthetic
  source 1..18: mol_type = other DNA
cagaatggcattatgttc

SEQ ID NO: 2020 - DNA, 18 bp, synthetic construct
  misc_feature 1..18: note = Synthetic
  source 1..18: mol_type = other DNA
cacagaatggcattatgt

SEQ ID NO: 2021 - DNA, 18 bp, synthetic construct
  misc_feature 1..18: note = Synthetic
  source 1..18: mol_type = other DNA
agcacagaatggcattat

SEQ ID NO: 2022 - DNA, 18 bp, synthetic construct
  misc_feature 1..18: note = Synthetic
  source 1..18: mol_type = other DNA
ggagcacagaatggcatt

SEQ ID NO: 2023 - DNA, 18 bp, synthetic construct
  misc_feature 1..18: note = Synthetic
  source 1..18: mol_type = other DNA
agggagcacagaatggca

SEQ ID NO: 2024 - DNA, 18 bp, synthetic construct
  misc_feature 1..18: note = Synthetic
  source 1..18: mol_type = other DNA
gaagggagcacagaatgg

SEQ ID NO: 2025 - DNA, 18 bp, synthetic construct
  misc_feature 1..18: note = Synthetic
  source 1..18: mol_type = other DNA
gggaagggagcacagaat

SEQ ID NO: 2026 - DNA, 18 bp, synthetic construct
  misc_feature 1..18: note = Synthetic
  source 1..18: mol_type = other DNA
cggggaagggagcacaga

SEQ ID NO: 2027 - DNA, 18 bp, synthetic construct
  misc_feature 1..18: note = Synthetic
  source 1..18: mol_type = other DNA
ggcggggaagggagcaca

SEQ ID NO: 2028 - DNA, 18 bp, synthetic construct
  misc_feature 1..18: note = Synthetic
  source 1..18: mol_type = other DNA
ctggcggggaagggagca

SEQ ID NO: 2029 - DNA, 18 bp, synthetic construct
  misc_feature 1..18: note = Synthetic
  source 1..18: mol_type = other DNA
gcctggcggggaagggag

SEQ ID NO: 2030 - DNA, 18 bp, synthetic construct
  misc_feature 1..18: note = Synthetic
  source 1..18: mol_type = other DNA
cagcctggcggggaaggg

SEQ ID NO: 2031 - DNA, 18 bp, synthetic construct
  misc_feature 1..18: note = Synthetic
  source 1..18: mol_type = other DNA
cacagcctggcggggaag

SEQ ID NO: 2032 - DNA, 18 bp, synthetic construct
  misc_feature 1..18: note = Synthetic
  source 1..18: mol_type = other DNA
cacacagcctggcgggga

SEQ ID NO: 2033 - DNA, 18 bp, synthetic construct
  misc_feature 1..18: note = Synthetic
  source 1..18: mol_type = other DNA
agcacacagcctggcggg

SEQ ID NO: 2034 - DNA, 18 bp, synthetic construct
  misc_feature 1..18: note = Synthetic
  source 1..18: mol_type = other DNA
gcagcacacagcctggcg

SEQ ID NO: 2035 - DNA, 18 bp, synthetic construct
  misc_feature 1..18: note = Synthetic
  source 1..18: mol_type = other DNA
tcgcagcacacagcctgg

SEQ ID NO: 2036 - DNA, 18 bp, synthetic construct
  misc_feature 1..18: note = Synthetic
  source 1..18: mol_type = other DNA
cctcgcagcacacagcct

SEQ ID NO: 2037 - DNA, 18 bp, synthetic construct
  misc_feature 1..18: note = Synthetic
  source 1..18: mol_type = other DNA
atcctcgcagcacacagc

SEQ ID NO: 2038 - DNA, 18 bp, synthetic construct
  misc_feature 1..18: note = Synthetic
  source 1..18: mol_type = other DNA
cgatcctcgcagcacaca

SEQ ID NO: 2039 - DNA, 18 bp, synthetic construct
  misc_feature 1..18: note = Synthetic
  source 1..18: mol_type = other DNA
ggcgatcctcgcagcaca

SEQ ID NO: 2040 - DNA, 18 bp, synthetic construct
  misc_feature 1..18: note = Synthetic
  source 1..18: mol_type = other DNA
ctggcgatcctcgcagca

SEQ ID NO: 2041 - DNA, 18 bp, synthetic construct
  misc_feature 1..18: note = Synthetic
  source 1..18: mol_type = other DNA
tgctggcgatcctcgcag

SEQ ID NO: 2042 - DNA, 18 bp, synthetic construct
  misc_feature 1..18: note = Synthetic
  source 1..18: mol_type = other DNA
agtgctggcgatcctcgc

SEQ ID NO: 2043 - DNA, 18 bp, synthetic construct
  misc_feature 1..18: note = Synthetic
  source 1..18: mol_type = other DNA
gcagtgctggcgatcctc

SEQ ID NO: 2044 - DNA, 18 bp, synthetic construct
  misc_feature 1..18: note = Synthetic
  source 1..18: mol_type = other DNA
cagcagtgctggcgatcc

SEQ ID NO: 2045 - DNA, 18 bp, synthetic construct
  misc_feature 1..18: note = Synthetic
  source 1..18: mol_type = other DNA
ggcagcagtgctggcgat

SEQ ID NO: 2046 - DNA, 18 bp, synthetic construct
  misc_feature 1..18: note = Synthetic
  source 1..18: mol_type = other DNA
cgggcagcagtgctggcg

SEQ ID NO: 2047 - DNA, 18 bp, synthetic construct
  misc_feature 1..18: note = Synthetic
  source 1..18: mol_type = other DNA
gccgggcagcagtgctgg

SEQ ID NO: 2048 - DNA, 18 bp, synthetic construct
  misc_feature 1..18: note = Synthetic
  source 1..18: mol_type = other DNA
cagccgggcagcagtgct

SEQ ID NO: 2049 - DNA, 18 bp, synthetic construct
  misc_feature 1..18: note = Synthetic
  source 1..18: mol_type = other DNA
gccagccgggcagcagtg

SEQ ID NO: 2050 - DNA, 18 bp, synthetic construct
  misc_feature 1..18: note = Synthetic
  source 1..18: mol_type = other DNA
tagccagccgggcagcag

SEQ ID NO: 2051 - DNA, 18 bp, synthetic construct
  misc_feature 1..18: note = Synthetic
  source 1..18: mol_type = other DNA
tgtagccagccgggcagc

SEQ ID NO: 2052 - DNA, 18 bp, synthetic construct
  misc_feature 1..18: note = Synthetic
  source 1..18: mol_type = other DNA
ggtgtagccagccgggca

SEQ ID NO: 2053 - DNA, 18 bp, synthetic construct
  misc_feature 1..18: note = Synthetic
  source 1..18: mol_type = other DNA
caggtgtagccagccggg

SEQ ID NO: 2054 - DNA, 18 bp, synthetic construct
  misc_feature 1..18: note = Synthetic
  source 1..18: mol_type = other DNA
tgcaggtgtagccagccg

SEQ ID NO: 2055 - DNA, 18 bp, synthetic construct
  misc_feature 1..18: note = Synthetic
  source 1..18: mol_type = other DNA
gttgcaggtgtagccagc

SEQ ID NO: 2056 - DNA, 18 bp, synthetic construct
  misc_feature 1..18: note = Synthetic
  source 1..18: mol_type = other DNA
acgttgcaggtgtagcca

SEQ ID NO: 2057 - DNA, 18 bp, synthetic construct
  misc_feature 1..18: note = Synthetic
  source 1..18: mol_type = other DNA
tcacgttgcaggtgtagc

SEQ ID NO: 2058 - DNA, 18 bp, synthetic construct
  misc_feature 1..18: note = Synthetic
  source 1..18: mol_type = other DNA
cttcacgttgcaggtgta

SEQ ID NO: 2059 - DNA, 18 bp, synthetic construct
  misc_feature 1..18: note = Synthetic
  source 1..18: mol_type = other DNA
gccttcacgttgcaggtg

SEQ ID NO: 2060 - DNA, 18 bp, synthetic construct
  misc_feature 1..18: note = Synthetic
  source 1..18: mol_type = other DNA
gagccttcacgttgcagg

SEQ ID NO: 2061 - DNA, 18 bp, synthetic construct
  misc_feature 1..18: note = Synthetic
  source 1..18: mol_type = other DNA
tcgagccttcacgttgca

SEQ ID NO: 2062 - DNA, 18 bp, synthetic construct
  misc_feature 1..18: note = Synthetic
  source 1..18: mol_type = other DNA
gatcgagccttcacgttg

SEQ ID NO: 2063 - DNA, 18 bp, synthetic construct
  misc_feature 1..18: note = Synthetic
  source 1..18: mol_type = other DNA
aggatcgagccttcacgt

SEQ ID NO: 2064 - DNA, 18 bp, synthetic construct
  misc_feature 1..18: note = Synthetic
  source 1..18: mol_type = other DNA
gcaggatcgagccttcac

SEQ ID NO: 2065 - DNA, 18 bp, synthetic construct
  misc_feature 1..18: note = Synthetic
  source 1..18: mol_type = other DNA
tcgcaggatcgagccttc

SEQ ID NO: 2066 - DNA, 18 bp, synthetic construct
  misc_feature 1..18: note = Synthetic
  source 1..18: mol_type = other DNA
tctcgcaggatcgagcct

SEQ ID NO: 2067 - DNA, 18 bp, synthetic construct
  misc_feature 1..18: note = Synthetic
  source 1..18: mol_type = other DNA
cttctcgcaggatcgagc

SEQ ID NO: 2068 - DNA, 18 bp, synthetic construct
  misc_feature 1..18: note = Synthetic
  source 1..18: mol_type = other DNA
tccttctcgcaggatcga

SEQ ID NO: 2069 - DNA, 18 bp, synthetic construct
  misc_feature 1..18: note = Synthetic
  source 1..18: mol_type = other DNA
cttccttctcgcaggatc

SEQ ID NO: 2070 - DNA, 18 bp, synthetic construct
  misc_feature 1..18: note = Synthetic
  source 1..18: mol_type = other DNA
cacttccttctcgcagga

SEQ ID NO: 2071 - DNA, 18 bp, synthetic construct
  misc_feature 1..18: note = Synthetic
  source 1..18: mol_type = other DNA
accacttccttctcgcag

SEQ ID NO: 2072 - DNA, 18 bp, synthetic construct
  misc_feature 1..18: note = Synthetic
  source 1..18: mol_type = other DNA
agaccacttccttctcgc

SEQ ID NO: 2073 - DNA, 18 bp, synthetic construct
  misc_feature 1..18: note = Synthetic
  source 1..18: mol_type = other DNA
agagaccacttccttctc

SEQ ID NO: 2074 - DNA, 18 bp, synthetic construct
  misc_feature 1..18: note = Synthetic
  source 1..18: mol_type = other DNA
gcagagaccacttccttc

SEQ ID NO: 2075 - DNA, 18 bp, synthetic construct
  misc_feature 1..18: note = Synthetic
  source 1..18: mol_type = other DNA
gggcagagaccacttcct

SEQ ID NO: 2076 - DNA, 18 bp, synthetic construct
  misc_feature 1..18: note = Synthetic
  source 1..18: mol_type = other DNA
ctgggcagagaccacttc

SEQ ID NO: 2077 - DNA, 18 bp, synthetic construct
  misc_feature 1..18: note = Synthetic
  source 1..18: mol_type = other DNA
ggctgggcagagaccact

SEQ ID NO: 2078 - DNA, 18 bp, synthetic construct
  misc_feature 1..18: note = Synthetic
  source 1..18: mol_type = other DNA
caggctgggcagagacca

SEQ ID NO: 2079 - DNA, 18 bp, synthetic construct
  misc_feature 1..18: note = Synthetic
  source 1..18: mol_type = other DNA
ggcaggctgggcagagac

SEQ ID NO: 2080 - DNA, 18 bp, synthetic construct
  misc_feature 1..18: note = Synthetic
  source 1..18: mol_type = other DNA
gtggcaggctgggcagag

SEQ ID NO: 2081 - DNA, 18 bp, synthetic construct
  misc_feature 1..18: note = Synthetic
  source 1..18: mol_type = other DNA
aggtggcaggctgggcag

SEQ ID NO: 2082 - DNA, 18 bp, synthetic construct
  misc_feature 1..18: note = Synthetic
  source 1..18: mol_type = other DNA
gaaggtggcaggctgggc

SEQ ID NO: 2083 - DNA, 18 bp, synthetic construct
  misc_feature 1..18: note = Synthetic
  source 1..18: mol_type = other DNA
aggaaggtggcaggctgg

SEQ ID NO: 2084 - DNA, 18 bp, synthetic construct
  misc_feature 1..18: note = Synthetic
  source 1..18: mol_type = other DNA
ccaggaaggtggcaggct

SEQ ID NO: 2085 - DNA, 18 bp, synthetic construct
  misc_feature 1..18: note = Synthetic
  source 1..18: mol_type = other DNA
ggccaggaaggtggcagg

SEQ ID NO: 2086 - DNA, 18 bp, synthetic construct
  misc_feature 1..18: note = Synthetic
  source 1..18: mol_type = other DNA
cgggccaggaaggtggca

SEQ ID NO: 2087 - DNA, 18 bp, synthetic construct
  misc_feature 1..18: note = Synthetic
  source 1..18: mol_type = other DNA
tacgggccaggaaggtgg

SEQ ID NO: 2088 - DNA, 18 bp, synthetic construct
  misc_feature 1..18: note = Synthetic
  source 1..18: mol_type = other DNA
gctacgggccaggaaggt

SEQ ID NO: 2089 - DNA, 18 bp, synthetic construct
  misc_feature 1..18: note = Synthetic
  source 1..18: mol_type = other DNA
gggctacgggccaggaag

SEQ ID NO: 2090 - DNA, 18 bp, synthetic construct
  misc_feature 1..18: note = Synthetic
  source 1..18: mol_type = other DNA
gagggctacgggccagga

SEQ ID NO: 2091 - DNA, 18 bp, synthetic construct
  misc_feature 1..18: note = Synthetic
  source 1..18: mol_type = other DNA
gtgagggctacgggccag

SEQ ID NO: 2092 - DNA, 18 bp, synthetic construct
  misc_feature 1..18: note = Synthetic
  source 1..18: mol_type = other DNA
acgtgagggctacgggcc

SEQ ID NO: 2093 - DNA, 18 bp, synthetic construct
  misc_feature 1..18: note = Synthetic
  source 1..18: mol_type = other DNA
ccacgtgagggctacggg

SEQ ID NO: 2094 - DNA, 18 bp, synthetic construct
  misc_feature 1..18: note = Synthetic
  source 1..18: mol_type = other DNA
acccacgtgagggctacg

SEQ ID NO: 2095 - DNA, 18 bp, synthetic construct
  misc_feature 1..18: note = Synthetic
  source 1..18: mol_type = other DNA
acacccacgtgagggcta

SEQ ID NO: 2096 - DNA, 18 bp, synthetic construct
  misc_feature 1..18: note = Synthetic
  source 1..18: mol_type = other DNA
tcacacccacgtgagggc

SEQ ID NO: 2097 - DNA, 18 bp, synthetic construct
  misc_feature 1..18: note = Synthetic
  source 1..18: mol_type = other DNA
cttcacacccacgtgagg

SEQ ID NO: 2098 - DNA, 18 bp, synthetic construct
  misc_feature 1..18: note = Synthetic
  source 1..18: mol_type = other DNA
tccttcacacccacgtga

SEQ ID NO: 2099 - DNA, 18 bp, synthetic construct
  misc_feature 1..18: note = Synthetic
  source 1..18: mol_type = other DNA
cgtccttcacacccacgt

SEQ ID NO: 2100 - DNA, 18 bp, synthetic construct
  misc_feature 1..18: note = Synthetic
  source 1..18: mol_type = other DNA
cacgtccttcacacccac

SEQ ID NO: 2101 - DNA, 18 bp, synthetic construct
  misc_feature 1..18: note = Synthetic
  source 1..18: mol_type = other DNA
tccacgtccttcacaccc

SEQ ID NO: 2102 - DNA, 18 bp, synthetic construct
  misc_feature 1..18: note = Synthetic
  source 1..18: mol_type = other DNA
actccacgtccttcacac

SEQ ID NO: 2103 - DNA, 18 bp, synthetic construct
  misc_feature 1..18: note = Synthetic
  source 1..18: mol_type = other DNA
acactccacgtccttcac

SEQ ID NO: 2104 - DNA, 18 bp, synthetic construct
  misc_feature 1..18: note = Synthetic
  source 1..18: mol_type = other DNA
ccacactccacgtccttc

SEQ ID NO: 2105 - DNA, 18 bp, synthetic construct
  misc_feature 1..18: note = Synthetic
  source 1..18: mol_type = other DNA
ccccacactccacgtcct

SEQ ID NO: 2106 - DNA, 18 bp, synthetic construct
  misc_feature 1..18: note = Synthetic
  source 1..18: mol_type = other DNA
ttccccacactccacgtc

SEQ ID NO: 2107 - DNA, 18 bp, synthetic construct
  misc_feature 1..18: note = Synthetic
  source 1..18: mol_type = other DNA
ccttccccacactccacg

SEQ ID NO: 2108 - DNA, 18 bp, synthetic construct
  misc_feature 1..18: note = Synthetic
  source 1..18: mol_type = other DNA
gtccttccccacactcca

SEQ ID NO: 2109 - DNA, 18 bp, synthetic construct
  misc_feature 1..18: note = Synthetic
  source 1..18: mol_type = other DNA
gtgtccttccccacactc

SEQ ID NO: 2110 - DNA, 18 bp, synthetic construct
  misc_feature 1..18: note = Synthetic
  source 1..18: mol_type = other DNA
aagtgtccttccccacac

SEQ ID NO: 2111 - DNA, 18 bp, synthetic construct
  misc_feature 1..18: note = Synthetic
  source 1..18: mol_type = other DNA
agaagtgtccttccccac

SEQ ID NO: 2112 - DNA, 18 bp, synthetic construct
  misc_feature 1..18: note = Synthetic
  source 1..18: mol_type = other DNA
gcagaagtgtccttcccc

SEQ ID NO: 2113 - DNA, 18 bp, synthetic construct
  misc_feature 1..18: note = Synthetic
  source 1..18: mol_type = other DNA
tggcagaagtgtccttcc

SEQ ID NO: 2114 - DNA, 18 bp, synthetic construct
  misc_feature 1..18: note = Synthetic
  source 1..18: mol_type = other DNA
catggcagaagtgtcctt

SEQ ID NO: 2115 - DNA, 18 bp, synthetic construct
  misc_feature 1..18: note = Synthetic
  source 1..18: mol_type = other DNA
atcatggcagaagtgtcc

SEQ ID NO: 2116 - DNA, 18 bp, synthetic construct
  misc_feature 1..18: note = Synthetic
  source 1..18: mol_type = other DNA
ttatcatggcagaagtgt

SEQ ID NO: 2117 - DNA, 18 bp, synthetic construct
  misc_feature 1..18: note = Synthetic
  source 1..18: mol_type = other DNA
ggttatcatggcagaagt

SEQ ID NO: 2118 - DNA, 18 bp, synthetic construct
  misc_feature 1..18: note = Synthetic
  source 1..18: mol_type = other DNA
ctggttatcatggcagaa

SEQ ID NO: 2119 - DNA, 18 bp, synthetic construct
  misc_feature 1..18: note = Synthetic
  source 1..18: mol_type = other DNA
gtctggttatcatggcag

SEQ ID NO: 2120 - DNA, 18 bp, synthetic construct
  misc_feature 1..18: note = Synthetic
  source 1..18: mol_type = other DNA
aggtctggttatcatggc

SEQ ID NO: 2121 - DNA, 18 bp, synthetic construct
  misc_feature 1..18: note = Synthetic
  source 1..18: mol_type = other DNA
gcaggtctggttatcatg

SEQ ID NO: 2122 - DNA, 18 bp, synthetic construct
  misc_feature 1..18: note = Synthetic
  source 1..18: mol_type = other DNA
cagcaggtctggttatca

SEQ ID NO: 2123 - DNA, 18 bp, synthetic construct
  misc_feature 1..18: note = Synthetic
  source 1..18: mol_type = other DNA
ggcagcaggtctggttat

SEQ ID NO: 2124 - DNA, 18 bp, synthetic construct
  misc_feature 1..18: note = Synthetic
  source 1..18: mol_type = other DNA
tcggcagcaggtctggtt

SEQ ID NO: 2125 - DNA, 18 bp, synthetic construct
  misc_feature 1..18: note = Synthetic
  source 1..18: mol_type = other DNA
tctcggcagcaggtctgg

SEQ ID NO: 2126 - DNA, 18 bp, synthetic construct
  misc_feature 1..18: note = Synthetic
  source 1..18: mol_type = other DNA
tgtctcggcagcaggtct

SEQ ID NO: 2127 - DNA, 18 bp, synthetic construct
  misc_feature 1..18: note = Synthetic
  source 1..18: mol_type = other DNA
gttgtctcggcagcaggt

SEQ ID NO: 2128 - DNA, 18 bp, synthetic construct
  misc_feature 1..18: note = Synthetic
  source 1..18: mol_type = other DNA
cggttgtctcggcagcag

SEQ ID NO: 2129 - DNA, 18 bp, synthetic construct
  misc_feature 1..18: note = Synthetic
  source 1..18: mol_type = other DNA
gtcggttgtctcggcagc

SEQ ID NO: 2130 - DNA, 18 bp, synthetic construct
  misc_feature 1..18: note = Synthetic
  source 1..18: mol_type = other DNA
ctgtcggttgtctcggca

SEQ ID NO: 2131 - DNA, 18 bp, synthetic construct
  misc_feature 1..18: note = Synthetic
  source 1..18: mol_type = other DNA
ccctgtcggttgtctcgg

SEQ ID NO: 2132 - DNA, 18 bp, synthetic construct
  misc_feature 1..18: note = Synthetic
  source 1..18: mol_type = other DNA
agccctgtcggttgtctc

SEQ ID NO: 2133 - DNA, 18 bp, synthetic construct
  misc_feature 1..18: note = Synthetic
  source 1..18: mol_type = other DNA
ccagccctgtcggttgtc

SEQ ID NO: 2134 - DNA, 18 bp, synthetic construct
  misc_feature 1..18: note = Synthetic
  source 1..18: mol_type = other DNA
gcccagccctgtcggttg

SEQ ID NO: 2135 - DNA, 18 bp, synthetic construct
  misc_feature 1..18: note = Synthetic
  source 1..18: mol_type = other DNA
aggcccagccctgtcggt

SEQ ID NO: 2136 - DNA, 18 bp, synthetic construct
  misc_feature 1..18: note = Synthetic
  source 1..18: mol_type = other DNA
gcaggcccagccctgtcg

SEQ ID NO: 2137 - DNA, 18 bp, synthetic construct
  misc_feature 1..18: note = Synthetic
  source 1..18: mol_type = other DNA
cagcaggcccagccctgt

SEQ ID NO: 2138 - DNA, 18 bp, synthetic construct
  misc_feature 1..18: note = Synthetic
  source 1..18: mol_type = other DNA
gacagcaggcccagccct

SEQ ID NO: 2139 - DNA, 18 bp, synthetic construct
  misc_feature 1..18: note = Synthetic
  source 1..18: mol_type = other DNA
gggacagcaggcccagcc

SEQ ID NO: 2140 - DNA, 18 bp, synthetic construct
  misc_feature 1..18: note = Synthetic
  source 1..18: mol_type = other DNA
tagggacagcaggcccag

SEQ ID NO: 2141 - DNA, 18 bp, synthetic construct
  misc_feature 1..18: note = Synthetic
  source 1..18: mol_type = other DNA
ggtagggacagcaggccc

SEQ ID NO: 2142 - DNA, 18 bp, synthetic construct
  misc_feature 1..18: note = Synthetic
  source 1..18: mol_type = other DNA
gcggtagggacagcaggc

SEQ ID NO: 2143 - DNA, 18 bp, synthetic construct
  misc_feature 1..18: note = Synthetic
  source 1..18: mol_type = other DNA
tggcggtagggacagcag

SEQ ID NO: 2144 - DNA, 18 bp, synthetic construct
  misc_feature 1..18: note = Synthetic
  source 1..18: mol_type = other DNA
atgggggttggcactgac

SEQ ID NO: 2145 - DNA, 18 bp, synthetic construct
  misc_feature 1..18: note = Synthetic
  source 1..18: mol_type = other DNA
ggatgggggttggcactg

SEQ ID NO: 2146 - DNA, 18 bp, synthetic construct
  misc_feature 1..18: note = Synthetic
  source 1..18: mol_type = other DNA
caggatgggggttggcac

SEQ ID NO: 2147 - DNA, 18 bp, synthetic construct
  misc_feature 1..18: note = Synthetic
  source 1..18: mol_type = other DNA
cccaggatgggggttggc

SEQ ID NO: 2148 - DNA, 18 bp, synthetic construct
  misc_feature 1..18: note = Synthetic
  source 1..18: mol_type = other DNA
gccccaggatgggggttg

SEQ ID NO: 2149 - DNA, 18 bp, synthetic construct
  misc_feature 1..18: note = Synthetic
  source 1..18: mol_type = other DNA
cagccccaggatgggggt

SEQ ID NO: 2150 - DNA, 18 bp, synthetic construct
  misc_feature 1..18: note = Synthetic
  source 1..18: mol_type = other DNA
cccagccccaggatgggg

SEQ ID NO: 2151 - DNA, 18 bp, synthetic construct
  misc_feature 1..18: note = Synthetic
  source 1..18: mol_type = other DNA
tacccagccccaggatgg

SEQ ID NO: 2152 - DNA, 18 bp, synthetic construct
  misc_feature 1..18: note = Synthetic
  source 1..18: mol_type = other DNA
catacccagccccaggat

SEQ ID NO: 2153 - DNA, 18 bp, synthetic construct
  misc_feature 1..18: note = Synthetic
  source 1..18: mol_type = other DNA
gccatacccagccccagg

SEQ ID NO: 2154 - DNA, 18 bp, synthetic construct
  misc_feature 1..18: note = Synthetic
  source 1..18: mol_type = other DNA
tggccatacccagcccca

SEQ ID NO: 2155 - DNA, 18 bp, synthetic construct
  misc_feature 1..18: note = Synthetic
  source 1..18: mol_type = other DNA
cctggccatacccagccc

SEQ ID NO: 2156 - DNA, 18 bp, synthetic construct
  misc_feature 1..18: note = Synthetic
  source 1..18: mol_type = other DNA
tccctggccatacccagc

SEQ ID NO: 2157 - DNA, 18 bp, synthetic construct
  misc_feature 1..18: note = Synthetic
  source 1..18: mol_type = other DNA
ggtccctggccataccca

SEQ ID NO: 2158 - DNA, 18 bp, synthetic construct
  misc_feature 1..18: note = Synthetic
  source 1..18: mol_type = other DNA
ctggtccctggccatacc

SEQ ID NO: 2159 - DNA, 18 bp, synthetic construct
  misc_feature 1..18: note = Synthetic
  source 1..18: mol_type = other DNA
acctggtccctggccata

SEQ ID NO: 2160 - DNA, 18 bp, synthetic construct
  misc_feature 1..18: note = Synthetic
  source 1..18: mol_type = other DNA
ggacctggtccctggcca

SEQ ID NO: 2161 - DNA, 18 bp, synthetic construct
  misc_feature 1..18: note = Synthetic
  source 1..18: mol_type = other DNA
gaggtgggacctggtccc

SEQ ID NO: 2162 - DNA, 18 bp, synthetic construct
  misc_feature 1..18: note = Synthetic
  source 1..18: mol_type = other DNA
acgaggtgggacctggtc

SEQ ID NO: 2163 - DNA, 18 bp, synthetic construct
  misc_feature 1..18: note = Synthetic
  source 1..18: mol_type = other DNA
ggacgaggtgggacctgg

SEQ ID NO: 2164 - DNA, 18 bp, synthetic construct
  misc_feature 1..18: note = Synthetic
  source 1..18: mol_type = other DNA
ttggacgaggtgggacct

SEQ ID NO: 2165 - DNA, 18 bp, synthetic construct
  misc_feature 1..18: note = Synthetic
  source 1..18: mol_type = other DNA
ggttggacgaggtgggac

SEQ ID NO: 2166 - DNA, 18 bp, synthetic construct
  misc_feature 1..18: note = Synthetic
  source 1..18: mol_type = other DNA
agggttggacgaggtggg

SEQ ID NO: 2167 - DNA, 18 bp, synthetic construct
  misc_feature 1..18: note = Synthetic
  source 1..18: mol_type = other DNA
agagggttggacgaggtg

SEQ ID NO: 2168 - DNA, 18 bp, synthetic construct
  misc_feature 1..18: note = Synthetic
  source 1..18: mol_type = other DNA
cgagagggttggacgagg

SEQ ID NO: 2169 - DNA, 18 bp, synthetic construct
  misc_feature 1..18: note = Synthetic
  source 1..18: mol_type = other DNA
ggcgagagggttggacga

SEQ ID NO: 2170 - DNA, 18 bp, synthetic construct
  misc_feature 1..18: note = Synthetic
  source 1..18: mol_type = other DNA
ggggcgagagggttggac

SEQ ID NO: 2171 - DNA, 18 bp, synthetic construct
  misc_feature 1..18: note = Synthetic
  source 1..18: mol_type = other DNA
ggggggcgagagggttgg

SEQ ID NO: 2172 - DNA, 18 bp, synthetic construct
  misc_feature 1..18: note = Synthetic
  source 1..18: mol_type = other DNA
gaggggggcgagagggtt

SEQ ID NO: 2173 - DNA, 18 bp, synthetic construct
  misc_feature 1..18: note = Synthetic
  source 1..18: mol_type = other DNA
cagaggggggcgagaggg

SEQ ID NO: 2174 - DNA, 18 bp, synthetic construct
  misc_feature 1..18: note = Synthetic
  source 1..18: mol_type = other DNA
gtcagaggggggcgagag

SEQ ID NO: 2175 - DNA, 18 bp, synthetic construct
  misc_feature 1..18: note = Synthetic
  source 1..18: mol_type = other DNA
tggtcagaggggggcgag

SEQ ID NO: 2176 - DNA, 18 bp, synthetic construct
  misc_feature 1..18: note = Synthetic
  source 1..18: mol_type = other DNA
gatggtcagaggggggcg

SEQ ID NO: 2177 - DNA, 18 bp, synthetic construct
  misc_feature 1..18: note = Synthetic
  source 1..18: mol_type = other DNA
tggatggtcagagggggg

SEQ ID NO: 2178 - DNA, 18 bp, synthetic construct
  misc_feature 1..18: note = Synthetic
  source 1..18: mol_type = other DNA
atcagcacaacagacgcc

SEQ ID NO: 2179 - DNA, 18 bp, synthetic construct
  misc_feature 1..18: note = Synthetic
  source 1..18: mol_type = other DNA
cgatcagcacaacagacg

SEQ ID NO: 2180 - DNA, 18 bp, synthetic construct
  misc_feature 1..18: note = Synthetic
  source 1..18: mol_type = other DNA
gccgatcagcacaacaga

SEQ ID NO: 2181 - DNA, 18 bp, synthetic construct
  misc_feature 1..18: note = Synthetic
  source 1..18: mol_type = other DNA
gcgccgatcagcacaaca

SEQ ID NO: 2182 - DNA, 18 bp, synthetic construct
  misc_feature 1..18: note = Synthetic
  source 1..18: mol_type = other DNA
tggcgccgatcagcacaa

SEQ ID NO: 2183 - DNA, 18 bp, synthetic construct
  misc_feature 1..18: note = Synthetic
  source 1..18: mol_type = other DNA
agtggcgccgatcagcac

SEQ ID NO: 2184 - DNA, 18 bp, synthetic construct
  misc_feature 1..18: note = Synthetic
  source 1..18: mol_type = other DNA
gcagtggcgccgatcagc

SEQ ID NO: 2185 - DNA, 18 bp, synthetic construct
  misc_feature 1..18: note = Synthetic
  source 1..18: mol_type = other DNA
cagcagtggcgccgatca

SEQ ID NO: 2186 - DNA, 18 bp, synthetic construct
  misc_feature 1..18: note = Synthetic
  source 1..18: mol_type = other DNA
gacagcagtggcgccgat

SEQ ID NO: 2187 - DNA, 18 bp, synthetic construct
  misc_feature 1..18: note = Synthetic
  source 1..18: mol_type = other DNA
aggacagcagtggcgccg

SEQ ID NO: 2188 - DNA, 18 bp, synthetic construct
  misc_feature 1..18: note = Synthetic
  source 1..18: mol_type = other DNA
gcaggacagcagtggcgc

SEQ ID NO: 2189 - DNA, 18 bp, synthetic construct
  misc_feature 1..18: note = Synthetic
  source 1..18: mol_type = other DNA
cagcaggacagcagtggc

SEQ ID NO: 2190 - DNA, 18 bp, synthetic construct
  misc_feature 1..18: note = Synthetic
  source 1..18: mol_type = other DNA
gccagcaggacagcagtg

SEQ ID NO: 2191 - DNA, 18 bp, synthetic construct
  misc_feature 1..18: note = Synthetic
  source 1..18: mol_type = other DNA
aagccagcaggacagcag

SEQ ID NO: 2192 - DNA, 18 bp, synthetic construct
  misc_feature 1..18: note = Synthetic
  source 1..18: mol_type = other DNA
ggaagccagcaggacagc

SEQ ID NO: 2193 - DNA, 18 bp, synthetic construct
  misc_feature 1..18: note = Synthetic
  source 1..18: mol_type = other DNA
gcggaagccagcaggaca

SEQ ID NO: 2194 - DNA, 18 bp, synthetic construct
  misc_feature 1..18: note = Synthetic
  source 1..18: mol_type = other DNA
cagcggaagccagcagga

SEQ ID NO: 2195 - DNA, 18 bp, synthetic construct
  misc_feature 1..18: note = Synthetic
  source 1..18: mol_type = other DNA
cgcagcggaagccagcag

SEQ ID NO: 2196 - DNA, 18 bp, synthetic construct
  misc_feature 1..18: note = Synthetic
  source 1..18: mol_type = other DNA
tgcgcagcggaagccagc

SEQ ID NO: 2197 - DNA, 18 bp, synthetic construct
  misc_feature 1..18: note = Synthetic
  source 1..18: mol_type = other DNA
gctgcgcagcggaagcca

SEQ ID NO: 2198 - DNA, 18 bp, synthetic construct
  misc_feature 1..18: note = Synthetic
  source 1..18: mol_type = other DNA
tggctgcgcagcggaagc

SEQ ID NO: 2199 - DNA, 18 bp, synthetic construct
  misc_feature 1..18: note = Synthetic
  source 1..18: mol_type = other DNA
cctggctgcgcagcggaa

SEQ ID NO: 2200 - DNA, 18 bp, synthetic construct
  misc_feature 1..18: note = Synthetic
  source 1..18: mol_type = other DNA
cccctggctgcgcagcgg

SEQ ID NO: 2201 - DNA, 18 bp, synthetic construct
  misc_feature 1..18: note = Synthetic
  source 1..18: mol_type = other DNA
tacccctggctgcgcagc

SEQ ID NO: 2202 - DNA, 18 bp, synthetic construct
  misc_feature 1..18: note = Synthetic
  source 1..18: mol_type = other DNA
ggtacccctggctgcgca

SEQ ID NO: 2203 - DNA, 18 bp, synthetic construct
  misc_feature 1..18: note = Synthetic
  source 1..18: mol_type = other DNA
ttggtacccctggctgcg

SEQ ID NO: 2204 - DNA, 18 bp, synthetic construct
  misc_feature 1..18: note = Synthetic
  source 1..18: mol_type = other DNA
acttggtacccctggctg

SEQ ID NO: 2205 - DNA, 18 bp, synthetic construct
  misc_feature 1..18: note = Synthetic
  source 1..18: mol_type = other DNA
acacttggtacccctggc

SEQ ID NO: 2206 - DNA, 18 bp, synthetic construct
  misc_feature 1..18: note = Synthetic
  source 1..18: mol_type = other DNA
aaacacttggtacccctg

SEQ ID NO: 2207 - DNA, 18 bp, synthetic construct
  misc_feature 1..18: note = Synthetic
  source 1..18: mol_type = other DNA
gcaaacacttggtacccc

SEQ ID NO: 2208 - DNA, 18 bp, synthetic construct
  misc_feature 1..18: note = Synthetic
  source 1..18: mol_type = other DNA
gcgcaaacacttggtacc

SEQ ID NO: 2209 - DNA, 18 bp, synthetic construct
  misc_feature 1..18: note = Synthetic
  source 1..18: mol_type = other DNA
ctgcgcaaacacttggta

SEQ ID NO: 2210 - DNA, 18 bp, synthetic construct
  misc_feature 1..18: note = Synthetic
  source 1..18: mol_type = other DNA
ccctgcgcaaacacttgg

SEQ ID NO: 2211 - DNA, 18 bp, synthetic construct
  misc_feature 1..18: note = Synthetic
  source 1..18: mol_type = other DNA
ctccctgcgcaaacactt

SEQ ID NO: 2212 - DNA, 18 bp, synthetic construct
  misc_feature 1..18: note = Synthetic
  source 1..18: mol_type = other DNA
gcctccctgcgcaaacac

SEQ ID NO: 2213 - DNA, 18 bp, synthetic construct
  misc_feature 1..18: note = Synthetic
  source 1..18: mol_type = other DNA
gggcctccctgcgcaaac

SEQ ID NO: 2214 - DNA, 18 bp, synthetic construct
  misc_feature 1..18: note = Synthetic
  source 1..18: mol_type = other DNA
cggggcctccctgcgcaa

SEQ ID NO: 2215 - DNA, 18 bp, synthetic construct
  misc_feature 1..18: note = Synthetic
  source 1..18: mol_type = other DNA
cgcggggcctccctgcgc

SEQ ID NO: 2216 - DNA, 18 bp, synthetic construct
  misc_feature 1..18: note = Synthetic
  source 1..18: mol_type = other DNA
agcgcggggcctccctgc

SEQ ID NO: 2217 - DNA, 18 bp, synthetic construct
  misc_feature 1..18: note = Synthetic
  source 1..18: mol_type = other DNA
ccagcgcggggcctccct

SEQ ID NO: 2218 - DNA, 18 bp, synthetic construct
  misc_feature 1..18: note = Synthetic
  source 1..18: mol_type = other DNA
tcccagcgcggggcctcc

SEQ ID NO: 2219 - DNA, 18 bp, synthetic construct
  misc_feature 1..18: note = Synthetic
  source 1..18: mol_type = other DNA
cgtcccagcgcggggcct

SEQ ID NO: 2220 - DNA, 18 bp, synthetic construct
  misc_feature 1..18: note = Synthetic
  source 1..18: mol_type = other DNA
ggcgtcccagcgcggggc

SEQ ID NO: 2221 - DNA, 18 bp, synthetic construct
  misc_feature 1..18: note = Synthetic
  source 1..18: mol_type = other DNA
ggggcgtcccagcgcggg

SEQ ID NO: 2222 - DNA, 18 bp, synthetic construct
  misc_feature 1..18: note = Synthetic
  source 1..18: mol_type = other DNA
aaggggcgtcccagcgcg

SEQ ID NO: 2223 - DNA, 18 bp, synthetic construct
  misc_feature 1..18: note = Synthetic
  source 1..18: mol_type = other DNA
caaaggggcgtcccagcg

SEQ ID NO: 2224 - DNA, 18 bp, synthetic construct
  misc_feature 1..18: note = Synthetic
  source 1..18: mol_type = other DNA
ctcaaaggggcgtcccag

SEQ ID NO: 2225 - DNA, 18 bp, synthetic construct
  misc_feature 1..18: note = Synthetic
  source 1..18: mol_type = other DNA
ccctcaaaggggcgtccc

SEQ ID NO: 2226 - DNA, 18 bp, synthetic construct
  misc_feature 1..18: note = Synthetic
  source 1..18: mol_type = other DNA
gtccctcaaaggggcgtc

SEQ ID NO: 2227 - DNA, 18 bp, synthetic construct
  misc_feature 1..18: note = Synthetic
  source 1..18: mol_type = other DNA
gggtccctcaaaggggcg

SEQ ID NO: 2228 - DNA, 18 bp, synthetic construct
  misc_feature 1..18: note = Synthetic
  source 1..18: mol_type = other DNA
ctgggtccctcaaagggg

SEQ ID NO: 2229 - DNA, 18 bp, synthetic construct
  misc_feature 1..18: note = Synthetic
  source 1..18: mol_type = other DNA
ggctgggtccctcaaagg

SEQ ID NO: 2230 - DNA, 18 bp, synthetic construct
  misc_feature 1..18: note = Synthetic
  source 1..18: mol_type = other DNA
aaggctgggtccctcaaa

SEQ ID NO: 2231 - DNA, 18 bp, synthetic construct
  misc_feature 1..18: note = Synthetic
  source 1..18: mol_type = other DNA
tcaaggctgggtccctca

SEQ ID NO: 2232 - DNA, 18 bp, synthetic construct
  misc_feature 1..18: note = Synthetic
  source 1..18: mol_type = other DNA
tctcaaggctgggtccct

SEQ ID NO: 2233 - DNA, 18 bp, synthetic construct
  misc_feature 1..18: note = Synthetic
  source 1..18: mol_type = other DNA
tgtctcaaggctgggtcc

SEQ ID NO: 2234 - DNA, 18 bp, synthetic construct
  misc_feature 1..18: note = Synthetic
  source 1..18: mol_type = other DNA
gctgtctcaaggctgggt

SEQ ID NO: 2235 - DNA, 18 bp, synthetic construct
  misc_feature 1..18: note = Synthetic
  source 1..18: mol_type = other DNA
cagctgtctcaaggctgg

SEQ ID NO: 2236 - DNA, 18 bp, synthetic construct
  misc_feature 1..18: note = Synthetic
  source 1..18: mol_type = other DNA
agcagctgtctcaaggct

SEQ ID NO: 2237 - DNA, 18 bp, synthetic construct
  misc_feature 1..18: note = Synthetic
  source 1..18: mol_type = other DNA
acagcagctgtctcaagg

SEQ ID NO: 2238 - DNA, 18 bp, synthetic construct
  misc_feature 1..18: note = Synthetic
  source 1..18: mol_type = other DNA
tcacagcagctgtctcaa

SEQ ID NO: 2239 - DNA, 18 bp, synthetic construct
  misc_feature 1..18: note = Synthetic
  source 1..18: mol_type = other DNA
gcctgcgtccgactccgc

SEQ ID NO: 2240 - DNA, 18 bp, synthetic construct
  misc_feature 1..18: note = Synthetic
  source 1..18: mol_type = other DNA
ctgcctgcgtccgactcc

SEQ ID NO: 2241 - DNA, 18 bp, synthetic construct
  misc_feature 1..18: note = Synthetic
  source 1..18: mol_type = other DNA
gtctgcctgcgtccgact

SEQ ID NO: 2242 - DNA, 18 bp, synthetic construct
  misc_feature 1..18: note = Synthetic
  source 1..18: mol_type = other DNA
tggtctgcctgcgtccga

SEQ ID NO: 2243 - DNA, 18 bp, synthetic construct
  misc_feature 1..18: note = Synthetic
  source 1..18: mol_type = other DNA
catggtctgcctgcgtcc

SEQ ID NO: 2244 - DNA, 18 bp, synthetic construct
  misc_feature 1..18: note = Synthetic
  source 1..18: mol_type = other DNA
cacatggtctgcctgcgt

SEQ ID NO: 2245 - DNA, 18 bp, synthetic construct
  misc_feature 1..18: note = Synthetic
  source 1..18: mol_type = other DNA
tccagaaggggacggcag

SEQ ID NO: 2246 - DNA, 18 bp, synthetic construct
  misc_feature 1..18: note = Synthetic
  source 1..18: mol_type = other DNA
tgtccagaaggggacggc

SEQ ID NO: 2247 - DNA, 18 bp, synthetic construct
  misc_feature 1..18: note = Synthetic
  source 1..18: mol_type = other DNA
tttgtccagaaggggacg

SEQ ID NO: 2248 - DNA, 18 bp, synthetic construct
  misc_feature 1..18: note = Synthetic
  source 1..18: mol_type = other DNA
catttgtccagaagggga

SEQ ID NO: 2249 - DNA, 18 bp, synthetic construct
  misc_feature 1..18: note = Synthetic
  source 1..18: mol_type = other DNA
gccatttgtccagaaggg

SEQ ID NO: 2250 - DNA, 18 bp, synthetic construct
  misc_feature 1..18: note = Synthetic
  source 1..18: mol_type = other DNA
gggccatttgtccagaag

SEQ ID NO: 2251 - DNA, 18 bp, synthetic construct
  misc_feature 1..18: note = Synthetic
  source 1..18: mol_type = other DNA
gtgggccatttgtccaga

SEQ ID NO: 2252 - DNA, 18 bp, synthetic construct
  misc_feature 1..18: note = Synthetic
  source 1..18: mol_type = other DNA
ttgtgggccatttgtcca

SEQ ID NO: 2253 - DNA, 18 bp, synthetic construct
  misc_feature 1..18: note = Synthetic
  source 1..18: mol_type = other DNA
ggcctctgggaaggggca

SEQ ID NO: 2254 - DNA, 18 bp, synthetic construct
  misc_feature 1..18: note = Synthetic
  source 1..18: mol_type = other DNA
acggcctctgggaagggg

SEQ ID NO: 2255 - DNA, 18 bp, synthetic construct
  misc_feature 1..18: note = Synthetic
  source 1..18: mol_type = other DNA
ccacggcctctgggaagg

SEQ ID NO: 2256 - DNA, 18 bp, synthetic construct
  misc_feature 1..18: note = Synthetic
  source 1..18: mol_type = other DNA
tgccacggcctctgggaa

SEQ ID NO: 2257 - DNA, 18 bp, synthetic construct
  misc_feature 1..18: note = Synthetic
  source 1..18: mol_type = other DNA
catgccacggcctctggg

SEQ ID NO: 2258 - DNA, 18 bp, synthetic construct
  misc_feature 1..18: note = Synthetic
  source 1..18: mol_type = other DNA
cgcatgccacggcctctg

SEQ ID NO: 2259 - DNA, 18 bp, synthetic construct
  misc_feature 1..18: note = Synthetic
  source 1..18: mol_type = other DNA
cccgcatgccacggcctc

SEQ ID NO: 2260 - DNA, 18 bp, synthetic construct
  misc_feature 1..18: note = Synthetic
  source 1..18: mol_type = other DNA
ttacctgatctttggaag

SEQ ID NO: 2261 - DNA, 18 bp, synthetic construct
  misc_feature 1..18: note = Synthetic
  source 1..18: mol_type = other DNA
tgttacctgatctttgga

SEQ ID NO: 2262 - DNA, 18 bp, synthetic construct
  misc_feature 1..18: note = Synthetic
  source 1..18: mol_type = other DNA
gttgttacctgatctttg

SEQ ID NO: 2263 - DNA, 18 bp, synthetic construct
  misc_feature 1..18: note = Synthetic
  source 1..18: mol_type = other DNA
gagttgttacctgatctt

SEQ ID NO: 2264 - DNA, 18 bp, synthetic construct
  misc_feature 1..18: note = Synthetic
  source 1..18: mol_type = other DNA
cggagttgttacctgatc

SEQ ID NO: 2265 - DNA, 18 bp, synthetic construct
  misc_feature 1..18: note = Synthetic
  source 1..18: mol_type = other DNA
cacggagttgttacctga

SEQ ID NO: 2266 - DNA, 18 bp, synthetic construct
  misc_feature 1..18: note = Synthetic
  source 1..18: mol_type = other DNA
agcctggggcatggggca

SEQ ID NO: 2267 - DNA, 18 bp, synthetic construct
  misc_feature 1..18: note = Synthetic
  source 1..18: mol_type = other DNA
gaagcctggggcatgggg

SEQ ID NO: 2268 - DNA, 18 bp, synthetic construct
  misc_feature 1..18: note = Synthetic
  source 1..18: mol_type = other DNA
aggaagcctggggcatgg

SEQ ID NO: 2269 - DNA, 18 bp, synthetic construct
  misc_feature 1..18: note = Synthetic
  source 1..18: mol_type = other DNA
gcaggaagcctggggcat

SEQ ID NO: 2270 - DNA, 18 bp, synthetic construct
  misc_feature 1..18: note = Synthetic
  source 1..18: mol_type = other DNA
cagcaggaagcctggggc

SEQ ID NO: 2271 - DNA, 18 bp, synthetic construct
  misc_feature 1..18: note = Synthetic
  source 1..18: mol_type = other DNA
cacagcaggaagcctggg

SEQ ID NO: 2272 - DNA, 18 bp, synthetic construct
  misc_feature 1..18: note = Synthetic
  source 1..18: mol_type = other DNA
actgccctgttagtcctc

SEQ ID NO: 2273 - DNA, 18 bp, synthetic construct
  misc_feature 1..18: note = Synthetic
  source 1..18: mol_type = other DNA
ccactgccctgttagtcc

SEQ ID NO: 2274 - DNA, 18 bp, synthetic construct
  misc_feature 1..18: note = Synthetic
  source 1..18: mol_type = other DNA
ggccactgccctgttagt

SEQ ID NO: 2275 - DNA, 18 bp, synthetic construct
  misc_feature 1..18: note = Synthetic
  source 1..18: mol_type = other DNA
aaggccactgccctgtta

SEQ ID NO: 2276 - DNA, 18 bp, synthetic construct
  misc_feature 1..18: note = Synthetic
  source 1..18: mol_type = other DNA
acaaggccactgccctgt

SEQ ID NO: 2277 - DNA, 18 bp, synthetic construct
  misc_feature 1..18: note = Synthetic
  source 1..18: mol_type = other DNA
ggacaaggccactgccct

SEQ ID NO: 2278 - DNA, 18 bp, synthetic construct
  misc_feature 1..18: note = Synthetic
  source 1..18: mol_type = other DNA
ctggacaaggccactgcc

SEQ ID NO: 2279 - DNA, 18 bp, synthetic construct
  misc_feature 1..18: note = Synthetic
  source 1..18: mol_type = other DNA
gcgttgggcattgggcag

SEQ ID NO: 2280 - DNA, 18 bp, synthetic construct
  misc_feature 1..18: note = Synthetic
  source 1..18: mol_type = other DNA
tggcgttgggcattgggc

SEQ ID NO: 2281 - DNA, 18 bp, synthetic construct
  misc_feature 1..18: note = Synthetic
  source 1..18: mol_type = other DNA
ggtggcgttgggcattgg

SEQ ID NO: 2282 - DNA, 18 bp, synthetic construct
  misc_feature 1..18: note = Synthetic
  source 1..18: mol_type = other DNA
caggtggcgttgggcatt

SEQ ID NO: 2283 - DNA, 18 bp, synthetic construct
  misc_feature 1..18: note = Synthetic
  source 1..18: mol_type = other DNA
agcaggtggcgttgggca

SEQ ID NO: 2284 - DNA, 18 bp, synthetic construct
  misc_feature 1..18: note = Synthetic
  source 1..18: mol_type = other DNA
gcagcaggtggcgttggg

SEQ ID NO: 2285 - DNA, 18 bp, synthetic construct
  misc_feature 1..18: note = Synthetic
  source 1..18: mol_type = other DNA
gagcagcaggtggcgttg

SEQ ID NO: 2286 - DNA, 18 bp, synthetic construct
  misc_feature 1..18: note = Synthetic
  source 1..18: mol_type = other DNA
cggagcagcaggtggcgt

SEQ ID NO: 2287 - DNA, 18 bp, synthetic construct
  misc_feature 1..18: note = Synthetic
  source 1..18: mol_type = other DNA
actgtgtgcgcaggcagc

SEQ ID NO: 2288 - DNA, 18 bp, synthetic construct
  misc_feature 1..18: note = Synthetic
  source 1..18: mol_type = other DNA
ccactgtgtgcgcaggca

SEQ ID NO: 2289 - DNA, 18 bp, synthetic construct
  misc_feature 1..18: note = Synthetic
  source 1..18: mol_type = other DNA
ccccactgtgtgcgcagg

SEQ ID NO: 2290 - DNA, 18 bp, synthetic construct
  misc_feature 1..18: note = Synthetic
  source 1..18: mol_type = other DNA
tcccccactgtgtgcgca

SEQ ID NO: 2291 - DNA, 18 bp, synthetic construct
  misc_feature 1..18: note = Synthetic
  source 1..18: mol_type = other DNA
catcccccactgtgtgcg

SEQ ID NO: 2292 - DNA, 18 bp, synthetic construct
  misc_feature 1..18: note = Synthetic
  source 1..18: mol_type = other DNA
cacatcccccactgtgtg

SEQ ID NO: 2293 - DNA, 18 bp, synthetic construct
  misc_feature 1..18: note = Synthetic
  source 1..18: mol_type = other DNA
gcctgggtaaaagggcag

SEQ ID NO: 2294 - DNA, 18 bp, synthetic construct
  misc_feature 1..18: note = Synthetic
  source 1..18: mol_type = other DNA
cagcctgggtaaaagggc

SEQ ID NO: 2295 - DNA, 18 bp, synthetic construct
  misc_feature 1..18: note = Synthetic
  source 1..18: mol_type = other DNA
cacagcctgggtaaaagg

SEQ ID NO: 2296 - DNA, 18 bp, synthetic construct
  misc_feature 1..18: note = Synthetic
  source 1..18: mol_type = other DNA
cacacagcctgggtaaaa

SEQ ID NO: 2297 - DNA, 18 bp, synthetic construct
  misc_feature 1..18: note = Synthetic
  source 1..18: mol_type = other DNA
agcacacagcctgggtaa

SEQ ID NO: 2298 - DNA, 18 bp, synthetic construct
  misc_feature 1..18: note = Synthetic
  source 1..18: mol_type = other DNA
acagcacacagcctgggt

SEQ ID NO: 2299 - DNA, 18 bp, synthetic construct
  misc_feature 1..18: note = Synthetic
  source 1..18: mol_type = other DNA
tcacagcacacagcctgg

SEQ ID NO: 2300 - DNA, 18 bp, synthetic construct
  misc_feature 1..18: note = Synthetic
  source 1..18: mol_type = other DNA
gcctctgggattggacag

SEQ ID NO: 2301 - DNA, 18 bp, synthetic construct
  misc_feature 1..18: note = Synthetic
  source 1..18: mol_type = other DNA
cagcctctgggattggac

SEQ ID NO: 2302 - DNA, 18 bp, synthetic construct
  misc_feature 1..18: note = Synthetic
  source 1..18: mol_type = other DNA
gacagcctctgggattgg

SEQ ID NO: 2303 - DNA, 18 bp, synthetic construct
  misc_feature 1..18: note = Synthetic
  source 1..18: mol_type = other DNA
cagacagcctctgggatt

SEQ ID NO: 2304 - DNA, 18 bp, synthetic construct
  misc_feature 1..18: note = Synthetic
  source 1..18: mol_type = other DNA
agcagacagcctctggga

SEQ ID NO: 2305 - DNA, 18 bp, synthetic construct
  misc_feature 1..18: note = Synthetic
  source 1..18: mol_type = other DNA
gcagcagacagcctctgg

SEQ ID NO: 2306 - DNA, 18 bp, synthetic construct
  misc_feature 1..18: note = Synthetic
  source 1..18: mol_type = other DNA
gagcagcagacagcctct

SEQ ID NO: 2307 - DNA, 18 bp, synthetic construct
  misc_feature 1..18: note = Synthetic
  source 1..18: mol_type = other DNA
gcatggggcaactggcag

SEQ ID NO: 2308 - DNA, 18 bp, synthetic construct
  misc_feature 1..18: note = Synthetic
  source 1..18: mol_type = other DNA
cagcatggggcaactggc

SEQ ID NO: 2309 - DNA, 18 bp, synthetic construct
  misc_feature 1..18: note = Synthetic
  source 1..18: mol_type = other DNA
cacagcatggggcaactg

SEQ ID NO: 2310 - DNA, 18 bp, synthetic construct
  misc_feature 1..18: note = Synthetic
  source 1..18: mol_type = other DNA
cacacagcatggggcaac

SEQ ID NO: 2311 - DNA, 18 bp, synthetic construct
  misc_feature 1..18: note = Synthetic
  source 1..18: mol_type = other DNA
agcacacagcatggggca

SEQ ID NO: 2312 - DNA, 18 bp, synthetic construct
  misc_feature 1..18: note = Synthetic
  source 1..18: mol_type = other DNA
gcagcacacagcatgggg

SEQ ID NO: 2313 - DNA, 18 bp, synthetic construct
  misc_feature 1..18: note = Synthetic
  source 1..18: mol_type = other DNA
tcgcagcacacagcatgg

SEQ ID NO: 2314 - DNA, 18 bp, synthetic construct
  misc_feature 1..18: note = Synthetic
  source 1..18: mol_type = other DNA
cctcgcagcacacagcat

SEQ ID NO: 2315 - DNA, 18 bp, synthetic construct
  misc_feature 1..18: note = Synthetic
  source 1..18: mol_type = other DNA
ccctggcggtagggacag

SEQ ID NO: 2316 - DNA, 18 bp, synthetic construct
  misc_feature 1..18: note = Synthetic
  source 1..18: mol_type = other DNA
cgccctggcggtagggac

SEQ ID NO: 2317 - DNA, 18 bp, synthetic construct
  misc_feature 1..18: note = Synthetic
  source 1..18: mol_type = other DNA
gacgccctggcggtaggg

SEQ ID NO: 2318 - DNA, 18 bp, synthetic construct
  misc_feature 1..18: note = Synthetic
  source 1..18: mol_type = other DNA
cagacgccctggcggtag

SEQ ID NO: 2319 - DNA, 18 bp, synthetic construct
  misc_feature 1..18: note = Synthetic
  source 1..18: mol_type = other DNA
aacagacgccctggcggt

SEQ ID NO: 2320 - DNA, 18 bp, synthetic construct
  misc_feature 1..18: note = Synthetic
  source 1..18: mol_type = other DNA
acaacagacgccctggcg

SEQ ID NO: 2321 - DNA, 18 bp, synthetic construct
  misc_feature 1..18: note = Synthetic
  source 1..18: mol_type = other DNA
tcacatgatccctagaaa

SEQ ID NO: 2322 - DNA, 18 bp, synthetic construct
  misc_feature 1..18: note = Synthetic
  source 1..18: mol_type = other DNA
acatgatccctagaaatg

SEQ ID NO: 2323 - DNA, 18 bp, synthetic construct
  misc_feature 1..18: note = Synthetic
  source 1..18: mol_type = other DNA
atgatccctagaaatggg

SEQ ID NO: 2324 - DNA, 18 bp, synthetic construct
  misc_feature 1..18: note = Synthetic
  source 1..18: mol_type = other DNA
gatccctagaaatggggt

SEQ ID NO: 2325 - DNA, 18 bp, synthetic construct
  misc_feature 1..18: note = Synthetic
  source 1..18: mol_type = other DNA
tccctagaaatggggtgt

SEQ ID NO: 2326 - DNA, 18 bp, synthetic construct
  misc_feature 1..18: note = Synthetic
  source 1..18: mol_type = other DNA
cctagaaatggggtgtgg

SEQ ID NO: 2327 - DNA, 18 bp, synthetic construct
  misc_feature 1..18: note = Synthetic
  source 1..18: mol_type = other DNA
tagaaatggggtgtgggg

SEQ ID NO: 2328 - DNA, 18 bp, synthetic construct
  misc_feature 1..18: note = Synthetic
  source 1..18: mol_type = other DNA
gaaatggggtgtggggcg

SEQ ID NO: 2329 - DNA, 18 bp, synthetic construct
  misc_feature 1..18: note = Synthetic
  source 1..18: mol_type = other DNA
aatggggtgtggggcgag

SEQ ID NO: 2330 - DNA, 18 bp, synthetic construct
  misc_feature 1..18: note = Synthetic
  source 1..18: mol_type = other DNA
tggggtgtggggcgagag

SEQ ID NO: 2331 - DNA, 18 bp, synthetic construct
  misc_feature 1..18: note = Synthetic
  source 1..18: mol_type = other DNA
gggtgtggggcgagagga

SEQ ID NO: 2332 - DNA, 18 bp, synthetic construct
  misc_feature 1..18: note = Synthetic
  source 1..18: mol_type = other DNA
gtgtggggcgagaggaag

SEQ ID NO: 2333 - DNA, 18 bp, synthetic construct
  misc_feature 1..18: note = Synthetic
  source 1..18: mol_type = other DNA
gtggggcgagaggaagca

SEQ ID NO: 2334 - DNA, 18 bp, synthetic construct
  misc_feature 1..18: note = Synthetic
  source 1..18: mol_type = other DNA
ggggcgagaggaagcagg

SEQ ID NO: 2335 - DNA, 18 bp, synthetic construct
  misc_feature 1..18: note = Synthetic
  source 1..18: mol_type = other DNA
agccctgatccctggcca

SEQ ID NO: 2336 - DNA, 18 bp, synthetic construct
  misc_feature 1..18: note = Synthetic
  source 1..18: mol_type = other DNA
gccctgatccctggccaa

SEQ ID NO: 2337 - DNA, 18 bp, synthetic construct
  misc_feature 1..18: note = Synthetic
  source 1..18: mol_type = other DNA
ccctgatccctggccaat

SEQ ID NO: 2338 - DNA, 16 bp, synthetic construct
  misc_feature 1..16: note = Synthetic
  source 1..16: mol_type = other DNA
ccctgatccctggcca

SEQ ID NO: 2339 - DNA, 18 bp, synthetic construct
  misc_feature 1..18: note = Synthetic
  source 1..18: mol_type = other DNA
ccgcggagtcggacgcag

SEQ ID NO: 2340 - DNA, 18 bp, synthetic construct
  misc_feature 1..18: note = Synthetic
  source 1..18: mol_type = other DNA
gcggagtcggacgcaggt

SEQ ID NO: 2341 - DNA, 18 bp, synthetic construct
  misc_feature 1..18: note = Synthetic
  source 1..18: mol_type = other DNA
ggagtcggacgcaggtag

SEQ ID NO: 2342 - DNA, 18 bp, synthetic construct
  misc_feature 1..18: note = Synthetic
  source 1..18: mol_type = other DNA
agtcggacgcaggtagga

SEQ ID NO: 2343 - DNA, 18 bp, synthetic construct
  misc_feature 1..18: note = Synthetic
  source 1..18: mol_type = other DNA
tcggacgcaggtaggaga

SEQ ID NO: 2344 - DNA, 18 bp, synthetic construct
  misc_feature 1..18: note = Synthetic
  source 1..18: mol_type = other DNA
ggacgcaggtaggagagc

SEQ ID NO: 2345 - DNA, 18 bp, synthetic construct
  misc_feature 1..18: note = Synthetic
  source 1..18: mol_type = other DNA
acgcaggtaggagagcgg

SEQ ID NO: 2346 - DNA, 18 bp, synthetic construct
  misc_feature 1..18: note = Synthetic
  source 1..18: mol_type = other DNA
gcaggtaggagagcggcc

SEQ ID NO: 2347 - DNA, 18 bp, synthetic construct
  misc_feature 1..18: note = Synthetic
  source 1..18: mol_type = other DNA
aggtaggagagcggccgc

SEQ ID NO: 2348 - DNA, 18 bp, synthetic construct
  misc_feature 1..18: note = Synthetic
  source 1..18: mol_type = other DNA
gtaggagagcggccgcgc

SEQ ID NO: 2349 - DNA, 18 bp, synthetic construct
  misc_feature 1..18: note = Synthetic
  source 1..18: mol_type = other DNA
aggagagcggccgcgcag

SEQ ID NO: 2350 - DNA, 18 bp, synthetic construct
  misc_feature 1..18: note = Synthetic
  source 1..18: mol_type = other DNA
gagagcggccgcgcagac

SEQ ID NO: 2351 - DNA, 18 bp, synthetic construct
  misc_feature 1..18: note = Synthetic
  source 1..18: mol_type = other DNA
gagcggccgcgcagacct

SEQ ID NO: 2352 - DNA, 18 bp, synthetic construct
  misc_feature 1..18: note = Synthetic
  source 1..18: mol_type = other DNA
gcggccgcgcagacctct

SEQ ID NO: 2353 - DNA, 18 bp, synthetic construct
  misc_feature 1..18: note = Synthetic
  source 1..18: mol_type = other DNA
ggccgcgcagacctctcg

SEQ ID NO: 2354 - DNA, 18 bp, synthetic construct
  misc_feature 1..18: note = Synthetic
  source 1..18: mol_type = other DNA
ccgcgcagacctctcgcc

SEQ ID NO: 2355 - DNA, 18 bp, synthetic construct
  misc_feature 1..18: note = Synthetic
  source 1..18: mol_type = other DNA
gcgcagacctctcgcctg

SEQ ID NO: 2356 - DNA, 18 bp, synthetic construct
  misc_feature 1..18: note = Synthetic
  source 1..18: mol_type = other DNA
gcagacctctcgcctgct

SEQ ID NO: 2357 - DNA, 18 bp, synthetic construct
  misc_feature 1..18: note = Synthetic
  source 1..18: mol_type = other DNA
agacctctcgcctgctcc

SEQ ID NO: 2358 - DNA, 18 bp, synthetic construct
  misc_feature 1..18: note = Synthetic
  source 1..18: mol_type = other DNA
acctctcgcctgctcctg

SEQ ID NO: 2359 - DNA, 18 bp, synthetic construct
  misc_feature 1..18: note = Synthetic
  source 1..18: mol_type = other DNA
ctctcgcctgctcctgcc

SEQ ID NO: 2360 - DNA, 18 bp, synthetic construct
  misc_feature 1..18: note = Synthetic
  source 1..18: mol_type = other DNA
ctcgcctgctcctgccca

SEQ ID NO: 2361 - DNA, 18 bp, synthetic construct
  misc_feature 1..18: note = Synthetic
  source 1..18: mol_type = other DNA
cgcctgctcctgcccagg

SEQ ID NO: 2362 - DNA, 18 bp, synthetic construct
  misc_feature 1..18: note = Synthetic
  source 1..18: mol_type = other DNA
cctgctcctgcccagggg

SEQ ID NO: 2363 - DNA, 18 bp, synthetic construct
  misc_feature 1..18: note = Synthetic
  source 1..18: mol_type = other DNA
tgctcctgcccaggggcc

SEQ ID NO: 2364 - DNA, 18 bp, synthetic construct
  misc_feature 1..18: note = Synthetic
  source 1..18: mol_type = other DNA
ctcctgcccaggggcccg

SEQ ID NO: 2365 - DNA, 18 bp, synthetic construct
  misc_feature 1..18: note = Synthetic
  source 1..18: mol_type = other DNA
cctgcccaggggcccgcc

SEQ ID NO: 2366 - DNA, 18 bp, synthetic construct
  misc_feature 1..18: note = Synthetic
  source 1..18: mol_type = other DNA
tgcccaggggcccgccag

SEQ ID NO: 2367 - DNA, 18 bp, synthetic construct
  misc_feature 1..18: note = Synthetic
  source 1..18: mol_type = other DNA
cccaggggcccgccaggg

SEQ ID NO: 2368 - DNA, 18 bp, synthetic construct
  misc_feature 1..18: note = Synthetic
  source 1..18: mol_type = other DNA
caggggcccgccagggcc

SEQ ID NO: 2369 - DNA, 18 bp, synthetic construct
  misc_feature 1..18: note = Synthetic
  source 1..18: mol_type = other DNA
ggggcccgccagggccat

SEQ ID NO: 2370 - DNA, 18 bp, synthetic construct
  misc_feature 1..18: note = Synthetic
  source 1..18: mol_type = other DNA
ggcccgccagggccatgt

SEQ ID NO: 2371 - DNA, 18 bp, synthetic construct
  misc_feature 1..18: note = Synthetic
  source 1..18: mol_type = other DNA
cccgccagggccatgtga

SEQ ID NO: 2372 - DNA, 18 bp, synthetic construct
  misc_feature 1..18: note = Synthetic
  source 1..18: mol_type = other DNA
cgccagggccatgtgagc

SEQ ID NO: 2373 - DNA, 18 bp, synthetic construct
  misc_feature 1..18: note = Synthetic
  source 1..18: mol_type = other DNA
ccagggccatgtgagctt

SEQ ID NO: 2374 - DNA, 18 bp, synthetic construct
  misc_feature 1..18: note = Synthetic
  source 1..18: mol_type = other DNA
agggccatgtgagcttga

SEQ ID NO: 2375 - DNA, 18 bp, synthetic construct
  misc_feature 1..18: note = Synthetic
  source 1..18: mol_type = other DNA
gggccatgtgagcttgag

SEQ ID NO: 2376 - DNA, 18 bp, synthetic construct
  misc_feature 1..18: note = Synthetic
  source 1..18: mol_type = other DNA
ggccatgtgagcttgagg

SEQ ID NO: 2377 - DNA, 16 bp, synthetic construct
  misc_feature 1..16: note = Synthetic
  source 1..16: mol_type = other DNA
gccatgtgagcttgag

SEQ ID NO: 2378 - DNA, 18 bp, synthetic construct
  misc_feature 1..18: note = Synthetic
  source 1..18: mol_type = other DNA
gccatgtgagcttgaggt

SEQ ID NO: 2379 - DNA, 18 bp, synthetic construct
  misc_feature 1..18: note = Synthetic
  source 1..18: mol_type = other DNA
ccatgtgagcttgaggtt

SEQ ID NO: 2380 - DNA, 18 bp, synthetic construct
  misc_feature 1..18: note = Synthetic
  source 1..18: mol_type = other DNA
atgtgagcttgaggttcc

SEQ ID NO: 2381 - DNA, 18 bp, synthetic construct
  misc_feature 1..18: note = Synthetic
  source 1..18: mol_type = other DNA
gtgagcttgaggttcccc

SEQ ID NO: 2382 - DNA, 18 bp, synthetic construct
  misc_feature 1..18: note = Synthetic
  source 1..18: mol_type = other DNA
gagcttgaggttcccctg

SEQ ID NO: 2383 - DNA, 18 bp, synthetic construct
  misc_feature 1..18: note = Synthetic
  source 1..18: mol_type = other DNA
gcttgaggttcccctgga

SEQ ID NO: 2384 - DNA, 18 bp, synthetic construct
  misc_feature 1..18: note = Synthetic
  source 1..18: mol_type = other DNA
ttgaggttcccctggagt

SEQ ID NO: 2385 - DNA, 18 bp, synthetic construct
  misc_feature 1..18: note = Synthetic
  source 1..18: mol_type = other DNA
gaggttcccctggagtct

SEQ ID NO: 2386 - DNA, 18 bp, synthetic construct
  misc_feature 1..18: note = Synthetic
  source 1..18: mol_type = other DNA
ggttcccctggagtctca

SEQ ID NO: 2387 - DNA, 18 bp, synthetic construct
  misc_feature 1..18: note = Synthetic
  source 1..18: mol_type = other DNA
ttcccctggagtctcagc

SEQ ID NO: 2388 - DNA, 18 bp, synthetic construct
  misc_feature 1..18: note = Synthetic
  source 1..18: mol_type = other DNA
cccctggagtctcagccg

SEQ ID NO: 2389 - DNA, 18 bp, synthetic construct
  misc_feature 1..18: note = Synthetic
  source 1..18: mol_type = other DNA
cctggagtctcagccgga

SEQ ID NO: 2390 - DNA, 18 bp, synthetic construct
  misc_feature 1..18: note = Synthetic
  source 1..18: mol_type = other DNA
tggagtctcagccggaga

SEQ ID NO: 2391 - DNA, 18 bp, synthetic construct
  misc_feature 1..18: note = Synthetic
  source 1..18: mol_type = other DNA
gagtctcagccggagaca

SEQ ID NO: 2392 - DNA, 18 bp, synthetic construct
  misc_feature 1..18: note = Synthetic
  source 1..18: mol_type = other DNA
gtctcagccggagacaac

SEQ ID NO: 2393 - DNA, 18 bp, synthetic construct
  misc_feature 1..18: note = Synthetic
  source 1..18: mol_type = other DNA
ctcagccggagacaacag

SEQ ID NO: 2394 - DNA, 18 bp, synthetic construct
  misc_feature 1..18: note = Synthetic
  source 1..18: mol_type = other DNA
cagccggagacaacagaa

SEQ ID NO: 2395 - DNA, 18 bp, synthetic construct
  misc_feature 1..18: note = Synthetic
  source 1..18: mol_type = other DNA
gccggagacaacagaaga

SEQ ID NO: 2396 - DNA, 18 bp, synthetic construct
  misc_feature 1..18: note = Synthetic
  source 1..18: mol_type = other DNA
cggagacaacagaagaac

SEQ ID NO: 2397 - DNA, 18 bp, synthetic construct
  misc_feature 1..18: note = Synthetic
  source 1..18: mol_type = other DNA
gagacaacagaagaaccg

SEQ ID NO: 2398 - DNA, 18 bp, synthetic construct
  misc_feature 1..18: note = Synthetic
  source 1..18: mol_type = other DNA
gacaacagaagaaccgct

SEQ ID NO: 2399 - DNA, 18 bp, synthetic construct
  misc_feature 1..18: note = Synthetic
  source 1..18: mol_type = other DNA
caacagaagaaccgctta

SEQ ID NO: 2400 - DNA, 18 bp, synthetic construct
  misc_feature 1..18: note = Synthetic
  source 1..18: mol_type = other DNA
acagaagaaccgcttact

SEQ ID NO: 2401 - DNA, 18 bp, synthetic construct
  misc_feature 1..18: note = Synthetic
  source 1..18: mol_type = other DNA
agaagaaccgcttactga

SEQ ID NO: 2402 - DNA, 18 bp, synthetic construct
  misc_feature 1..18: note = Synthetic
  source 1..18: mol_type = other DNA
aagaaccgcttactgaaa

SEQ ID NO: 2403 - DNA, 18 bp, synthetic construct
  misc_feature 1..18: note = Synthetic
  source 1..18: mol_type = other DNA
gaaccgcttactgaaact

SEQ ID NO: 2404 - DNA, 18 bp, synthetic construct
  misc_feature 1..18: note = Synthetic
  source 1..18: mol_type = other DNA
accgcttactgaaactcc

SEQ ID NO: 2405 - DNA, 18 bp, synthetic construct
  misc_feature 1..18: note = Synthetic
  source 1..18: mol_type = other DNA
cgcttactgaaactcctt

SEQ ID NO: 2406 - DNA, 18 bp, synthetic construct
  misc_feature 1..18: note = Synthetic
  source 1..18: mol_type = other DNA
cttactgaaactccttgg

SEQ ID NO: 2407 - DNA, 18 bp, synthetic construct
  misc_feature 1..18: note = Synthetic
  source 1..18: mol_type = other DNA
tactgaaactccttgggg

SEQ ID NO: 2408 - DNA, 18 bp, synthetic construct
  misc_feature 1..18: note = Synthetic
  source 1..18: mol_type = other DNA
ctgaaactccttgggggt

SEQ ID NO: 2409 - DNA, 18 bp, synthetic construct
  misc_feature 1..18: note = Synthetic
  source 1..18: mol_type = other DNA
gaaactccttgggggttc

SEQ ID NO: 2410 - DNA, 18 bp, synthetic construct
  misc_feature 1..18: note = Synthetic
  source 1..18: mol_type = other DNA
aactccttgggggttctg

SEQ ID NO: 2411 - DNA, 18 bp, synthetic construct
  misc_feature 1..18: note = Synthetic
  source 1..18: mol_type = other DNA
ctccttgggggttctgat

SEQ ID NO: 2412 - DNA, 18 bp, synthetic construct
  misc_feature 1..18: note = Synthetic
  source 1..18: mol_type = other DNA
ccttgggggttctgatac

SEQ ID NO: 2413 - DNA, 18 bp, synthetic construct
  misc_feature 1..18: note = Synthetic
  source 1..18: mol_type = other DNA
ttgggggttctgatacac

SEQ ID NO: 2414 - DNA, 18 bp, synthetic construct
  misc_feature 1..18: note = Synthetic
  source 1..18: mol_type = other DNA
gggggttctgatacacta

SEQ ID NO: 2415 - DNA, 18 bp, synthetic construct
  misc_feature 1..18: note = Synthetic
  source 1..18: mol_type = other DNA
gggttctgatacactagg

SEQ ID NO: 2416 - DNA, 18 bp, synthetic construct
  misc_feature 1..18: note = Synthetic
  source 1..18: mol_type = other DNA
gttctgatacactagggg

SEQ ID NO: 2417 - DNA, 18 bp, synthetic construct
  misc_feature 1..18: note = Synthetic
  source 1..18: mol_type = other DNA
tctgatacactaggggga

SEQ ID NO: 2418 - DNA, 18 bp, synthetic construct
  misc_feature 1..18: note = Synthetic
  source 1..18: mol_type = other DNA
tgatacactagggggagt

SEQ ID NO: 2419 - DNA, 18 bp, synthetic construct
  misc_feature 1..18: note = Synthetic
  source 1..18: mol_type = other DNA
atacactagggggagttt

SEQ ID NO: 2420 - DNA, 18 bp, synthetic construct
  misc_feature 1..18: note = Synthetic
  source 1..18: mol_type = other DNA
acactagggggagtttta

SEQ ID NO: 2421 - DNA, 18 bp, synthetic construct
  misc_feature 1..18: note = Synthetic
  source 1..18: mol_type = other DNA
actagggggagttttatg

SEQ ID NO: 2422 - DNA, 18 bp, synthetic construct
  misc_feature 1..18: note = Synthetic
  source 1..18: mol_type = other DNA
tagggggagttttatggg

SEQ ID NO: 2423 - DNA, 18 bp, synthetic construct
  misc_feature 1..18: note = Synthetic
  source 1..18: mol_type = other DNA
gggggagttttatgggaa

SEQ ID NO: 2424 - DNA, 18 bp, synthetic construct
  misc_feature 1..18: note = Synthetic
  source 1..18: mol_type = other DNA
gggagttttatgggaaag

SEQ ID NO: 2425 - DNA, 18 bp, synthetic construct
  misc_feature 1..18: note = Synthetic
  source 1..18: mol_type = other DNA
gagttttatgggaaagag

SEQ ID NO: 2426 - DNA, 18 bp, synthetic construct
  misc_feature 1..18: note = Synthetic
  source 1..18: mol_type = other DNA
gttttatgggaaagagga

SEQ ID NO: 2427 - DNA, 18 bp, synthetic construct
  misc_feature 1..18: note = Synthetic
  source 1..18: mol_type = other DNA
tttatgggaaagaggaag

SEQ ID NO: 2428 - DNA, 18 bp, synthetic construct
  misc_feature 1..18: note = Synthetic
  source 1..18: mol_type = other DNA
tatgggaaagaggaagca

SEQ ID NO: 2429 - DNA, 18 bp, synthetic construct
  misc_feature 1..18: note = Synthetic
  source 1..18: mol_type = other DNA
tgggaaagaggaagcagt

SEQ ID NO: 2430 - DNA, 18 bp, synthetic construct
  misc_feature 1..18: note = Synthetic
  source 1..18: mol_type = other DNA
ggaaagaggaagcagtaa

SEQ ID NO: 2431 - DNA, 18 bp, synthetic construct
  misc_feature 1..18: note = Synthetic
  source 1..18: mol_type = other DNA
aaagaggaagcagtaatt

SEQ ID NO: 2432 - DNA, 18 bp, synthetic construct
  misc_feature 1..18: note = Synthetic
  source 1..18: mol_type = other DNA
agaggaagcagtaattgc

SEQ ID NO: 2433 - DNA, 18 bp, synthetic construct
  misc_feature 1..18: note = Synthetic
  source 1..18: mol_type = other DNA
aggaagcagtaattgcag

SEQ ID NO: 2434 - DNA, 18 bp, synthetic construct
  misc_feature 1..18: note = Synthetic
  source 1..18: mol_type = other DNA
gaagcagtaattgcagtg

SEQ ID NO: 2435 - DNA, 18 bp, synthetic construct
  misc_feature 1..18: note = Synthetic
  source 1..18: mol_type = other DNA
agcagtaattgcagtgac

SEQ ID NO: 2436 - DNA, 18 bp, synthetic construct
  misc_feature 1..18: note = Synthetic
  source 1..18: mol_type = other DNA
cagtaattgcagtgacgc

SEQ ID NO: 2437 - DNA, 18 bp, synthetic construct
  misc_feature 1..18: note = Synthetic
  source 1..18: mol_type = other DNA
gtaattgcagtgacgccc

SEQ ID NO: 2438 - DNA, 18 bp, synthetic construct
  misc_feature 1..18: note = Synthetic
  source 1..18: mol_type = other DNA
aattgcagtgacgccccg

SEQ ID NO: 2439 - DNA, 18 bp, synthetic construct
  misc_feature 1..18: note = Synthetic
  source 1..18: mol_type = other DNA
ttgcagtgacgccccgtt

SEQ ID NO: 2440 - DNA, 18 bp, synthetic construct
  misc_feature 1..18: note = Synthetic
  source 1..18: mol_type = other DNA
gcagtgacgccccgttag

SEQ ID NO: 2441 - DNA, 18 bp, synthetic construct
  misc_feature 1..18: note = Synthetic
  source 1..18: mol_type = other DNA
agtgacgccccgttagaa

SEQ ID NO: 2442 - DNA, 18 bp, synthetic construct
  misc_feature 1..18: note = Synthetic
  source 1..18: mol_type = other DNA
tgacgccccgttagaagg

SEQ ID NO: 2443 - DNA, 18 bp, synthetic construct
  misc_feature 1..18: note = Synthetic
  source 1..18: mol_type = other DNA
acgccccgttagaagggg

SEQ ID NO: 2444 - DNA, 18 bp, synthetic construct
  misc_feature 1..18: note = Synthetic
  source 1..18: mol_type = other DNA
gccccgttagaaggggct

SEQ ID NO: 2445 - DNA, 18 bp, synthetic construct
  misc_feature 1..18: note = Synthetic
  source 1..18: mol_type = other DNA
cccgttagaaggggcttt

SEQ ID NO: 2446 - DNA, 18 bp, synthetic construct
  misc_feature 1..18: note = Synthetic
  source 1..18: mol_type = other DNA
cgttagaaggggctttct

SEQ ID NO: 2447 - DNA, 18 bp, synthetic construct
  misc_feature 1..18: note = Synthetic
  source 1..18: mol_type = other DNA
ttagaaggggctttctac

SEQ ID NO: 2448 - DNA, 18 bp, synthetic construct
  misc_feature 1..18: note = Synthetic
  source 1..18: mol_type = other DNA
agaaggggctttctacct

SEQ ID NO: 2449 - DNA, 18 bp, synthetic construct
  misc_feature 1..18: note = Synthetic
  source 1..18: mol_type = other DNA
aaggggctttctacctcc

SEQ ID NO: 2450 - DNA, 18 bp, synthetic construct
  misc_feature 1..18: note = Synthetic
  source 1..18: mol_type = other DNA
ggggctttctacctcccc

SEQ ID NO: 2451 - DNA, 18 bp, synthetic construct
  misc_feature 1..18: note = Synthetic
  source 1..18: mol_type = other DNA
ggctttctacctccccag

SEQ ID NO: 2452 - DNA, 18 bp, synthetic construct
  misc_feature 1..18: note = Synthetic
  source 1..18: mol_type = other DNA
ctttctacctccccagca

SEQ ID NO: 2453 - DNA, 18 bp, synthetic construct
  misc_feature 1..18: note = Synthetic
  source 1..18: mol_type = other DNA
ttctacctccccagcatt

SEQ ID NO: 2454 - DNA, 18 bp, synthetic construct
  misc_feature 1..18: note = Synthetic
  source 1..18: mol_type = other DNA
ctacctccccagcattcc

SEQ ID NO: 2455 - DNA, 18 bp, synthetic construct
  misc_feature 1..18: note = Synthetic
  source 1..18: mol_type = other DNA
acctccccagcattcccc

SEQ ID NO: 2456 - DNA, 18 bp, synthetic construct
  misc_feature 1..18: note = Synthetic
  source 1..18: mol_type = other DNA
ctccccagcattccccca

SEQ ID NO: 2457 - DNA, 18 bp, synthetic construct
  misc_feature 1..18: note = Synthetic
  source 1..18: mol_type = other DNA
ccccagcattcccccaaa

SEQ ID NO: 2458 - DNA, 18 bp, synthetic construct
  misc_feature 1..18: note = Synthetic
  source 1..18: mol_type = other DNA
ccagcattcccccaaagc

SEQ ID NO: 2459 - DNA, 18 bp, synthetic construct
  misc_feature 1..18: note = Synthetic
  source 1..18: mol_type = other DNA
agcattcccccaaagcag

SEQ ID NO: 2460 - DNA, 18 bp, synthetic construct
  misc_feature 1..18: note = Synthetic
  source 1..18: mol_type = other DNA
cattcccccaaagcaggg

SEQ ID NO: 2461 - DNA, 18 bp, synthetic construct
  misc_feature 1..18: note = Synthetic
  source 1..18: mol_type = other DNA
ttcccccaaagcagggac

SEQ ID NO: 2462 - DNA, 18 bp, synthetic construct
  misc_feature 1..18: note = Synthetic
  source 1..18: mol_type = other DNA
cccccaaagcagggacca

SEQ ID NO: 2463 - DNA, 18 bp, synthetic construct
  misc_feature 1..18: note = Synthetic
  source 1..18: mol_type = other DNA
cccaaagcagggaccaca

SEQ ID NO: 2464 - DNA, 18 bp, synthetic construct
  misc_feature 1..18: note = Synthetic
  source 1..18: mol_type = other DNA
caaagcagggaccacacc

SEQ ID NO: 2465 - DNA, 18 bp, synthetic construct
  misc_feature 1..18: note = Synthetic
  source 1..18: mol_type = other DNA
aagcagggaccacaccat

SEQ ID NO: 2466 - DNA, 18 bp, synthetic construct
  misc_feature 1..18: note = Synthetic
  source 1..18: mol_type = other DNA
gcagggaccacaccattc

SEQ ID NO: 2467 - DNA, 18 bp, synthetic construct
  misc_feature 1..18: note = Synthetic
  source 1..18: mol_type = other DNA
cagggaccacaccattct

SEQ ID NO: 2468 - DNA, 16 bp, synthetic construct
  misc_feature 1..16: note = Synthetic
  source 1..16: mol_type = other DNA
agggaccacaccattc

SEQ ID NO: 2469 - DNA, 18 bp, synthetic construct
  misc_feature 1..18: note = Synthetic
  source 1..18: mol_type = other DNA
agggaccacaccattctt

SEQ ID NO: 2470 - DNA, 18 bp, synthetic construct
  misc_feature 1..18: note = Synthetic
  source 1..18: mol_type = other DNA
gggaccacaccattcttg

SEQ ID NO: 2471 - DNA, 18 bp, synthetic construct
  misc_feature 1..18: note = Synthetic
  source 1..18: mol_type = other DNA
ggaccacaccattcttga

SEQ ID NO: 2472 - DNA, 16 bp, synthetic construct
  misc_feature 1..16: note = Synthetic
  source 1..16: mol_type = other DNA
gaccacaccattcttg

SEQ ID NO: 2473 - DNA, 18 bp, synthetic construct
  misc_feature 1..18: note = Synthetic
  source 1..18: mol_type = other DNA
gaccacaccattcttgac

SEQ ID NO: 2474 - DNA, 18 bp, synthetic construct
  misc_feature 1..18: note = Synthetic
  source 1..18: mol_type = other DNA
accacaccattcttgacc

SEQ ID NO: 2475 - DNA, 18 bp, synthetic construct
  misc_feature 1..18: note = Synthetic
  source 1..18: mol_type = other DNA
ccacaccattcttgaccc

SEQ ID NO: 2476 - DNA, 16 bp, synthetic construct
  misc_feature 1..16: note = Synthetic
  source 1..16: mol_type = other DNA
cacaccattcttgacc

SEQ ID NO: 2477 - DNA, 18 bp, synthetic construct
  misc_feature 1..18: note = Synthetic
  source 1..18: mol_type = other DNA
cacaccattcttgaccca

SEQ ID NO: 2478 - DNA, 18 bp, synthetic construct
  misc_feature 1..18: note = Synthetic
  source 1..18: mol_type = other DNA
caccattcttgacccagc

SEQ ID NO: 2479 - DNA, 18 bp, synthetic construct
  misc_feature 1..18: note = Synthetic
  source 1..18: mol_type = other DNA
ccattcttgacccagctc

SEQ ID NO: 2480 - DNA, 18 bp, synthetic construct
  misc_feature 1..18: note = Synthetic
  source 1..18: mol_type = other DNA
attcttgacccagctcca

SEQ ID NO: 2481 - DNA, 18 bp, synthetic construct
  misc_feature 1..18: note = Synthetic
  source 1..18: mol_type = other DNA
tcttgacccagctccacc

SEQ ID NO: 2482 - DNA, 18 bp, synthetic construct
  misc_feature 1..18: note = Synthetic
  source 1..18: mol_type = other DNA
ttgacccagctccacccc

SEQ ID NO: 2483 - DNA, 18 bp, synthetic construct
  misc_feature 1..18: note = Synthetic
  source 1..18: mol_type = other DNA
gacccagctccacccctg

SEQ ID NO: 2484 - DNA, 18 bp, synthetic construct
  misc_feature 1..18: note = Synthetic
  source 1..18: mol_type = other DNA
cccagctccacccctgtc

SEQ ID NO: 2485 - DNA, 18 bp, synthetic construct
  misc_feature 1..18: note = Synthetic
  source 1..18: mol_type = other DNA
cagctccacccctgtcgg

SEQ ID NO: 2486 - DNA, 18 bp, synthetic construct
  misc_feature 1..18: note = Synthetic
  source 1..18: mol_type = other DNA
gctccacccctgtcggta

SEQ ID NO: 2487 - DNA, 18 bp, synthetic construct
  misc_feature 1..18: note = Synthetic
  source 1..18: mol_type = other DNA
tccacccctgtcggtagg

SEQ ID NO: 2488 - DNA, 18 bp, synthetic construct
  misc_feature 1..18: note = Synthetic
  source 1..18: mol_type = other DNA
cacccctgtcggtaggtg

SEQ ID NO: 2489 - DNA, 18 bp, synthetic construct
  misc_feature 1..18: note = Synthetic
  source 1..18: mol_type = other DNA
cccctgtcggtaggtgct

SEQ ID NO: 2490 - DNA, 18 bp, synthetic construct
  misc_feature 1..18: note = Synthetic
  source 1..18: mol_type = other DNA
cctgtcggtaggtgctgg

SEQ ID NO: 2491 - DNA, 18 bp, synthetic construct
  misc_feature 1..18: note = Synthetic
  source 1..18: mol_type = other DNA
tgtcggtaggtgctggct

SEQ ID NO: 2492 - DNA, 18 bp, synthetic construct
  misc_feature 1..18: note = Synthetic
  source 1..18: mol_type = other DNA
tcggtaggtgctggcttc

SEQ ID NO: 2493 - DNA, 18 bp, synthetic construct
  misc_feature 1..18: note = Synthetic
  source 1..18: mol_type = other DNA
ggtaggtgctggcttctt

SEQ ID NO: 2494 - DNA, 18 bp, synthetic construct
  misc_feature 1..18: note = Synthetic
  source 1..18: mol_type = other DNA
taggtgctggcttcttcc

SEQ ID NO: 2495 - DNA, 18 bp, synthetic construct
  misc_feature 1..18: note = Synthetic
  source 1..18: mol_type = other DNA
ggtgctggcttcttcccc

SEQ ID NO: 2496 - DNA, 18 bp, synthetic construct
  misc_feature 1..18: note = Synthetic
  source 1..18: mol_type = other DNA
tgctggcttcttcccctc

SEQ ID NO: 2497 - DNA, 18 bp, synthetic construct
  misc_feature 1..18: note = Synthetic
  source 1..18: mol_type = other DNA
ctggcttcttcccctctc

SEQ ID NO: 2498 - DNA, 18 bp, synthetic construct
  misc_feature 1..18: note = Synthetic
  source 1..18: mol_type = other DNA
ggcttcttcccctctcct

SEQ ID NO: 2499 - DNA, 18 bp, synthetic construct
  misc_feature 1..18: note = Synthetic
  source 1..18: mol_type = other DNA
cttcttcccctctcctgg

SEQ ID NO: 2500 - DNA, 18 bp, synthetic construct
  misc_feature 1..18: note = Synthetic
  source 1..18: mol_type = other DNA
tcttcccctctcctggtg

SEQ ID NO: 2501 - DNA, 18 bp, synthetic construct
  misc_feature 1..18: note = Synthetic
  source 1..18: mol_type = other DNA
ttcccctctcctggtggt

SEQ ID NO: 2502 - DNA, 18 bp, synthetic construct
  misc_feature 1..18: note = Synthetic
  source 1..18: mol_type = other DNA
cccctctcctggtggtgg

SEQ ID NO: 2503 - DNA, 18 bp, synthetic construct
  misc_feature 1..18: note = Synthetic
  source 1..18: mol_type = other DNA
cctctcctggtggtggtg

SEQ ID NO: 2504 - DNA, 18 bp, synthetic construct
  misc_feature 1..18: note = Synthetic
  source 1..18: mol_type = other DNA
tctcctggtggtggtggg

SEQ ID NO: 2505 - DNA, 18 bp, synthetic construct
  misc_feature 1..18: note = Synthetic
  source 1..18: mol_type = other DNA
tcctggtggtggtgggtg

SEQ ID NO: 2506 - DNA, 18 bp, synthetic construct
  misc_feature 1..18: note = Synthetic
  source 1..18: mol_type = other DNA
ctggtggtggtgggtggt

SEQ ID NO: 2507 - DNA, 18 bp, synthetic construct
  misc_feature 1..18: note = Synthetic
  source 1..18: mol_type = other DNA
ggtggtggtgggtggttc

SEQ ID NO: 2508 - DNA, 18 bp, synthetic construct
  misc_feature 1..18: note = Synthetic
  source 1..18: mol_type = other DNA
tggtggtgggtggttccc

SEQ ID NO: 2509 - DNA, 18 bp, synthetic construct
  misc_feature 1..18: note = Synthetic
  source 1..18: mol_type = other DNA
gtggtgggtggttcccgc

SEQ ID NO: 2510 - DNA, 18 bp, synthetic construct
  misc_feature 1..18: note = Synthetic
  source 1..18: mol_type = other DNA
tttagggtaaacaggagg

SEQ ID NO: 2511 - DNA, 18 bp, synthetic construct
  misc_feature 1..18: note = Synthetic
  source 1..18: mol_type = other DNA
tagggtaaacaggagggg

SEQ ID NO: 2512 - DNA, 18 bp, synthetic construct
  misc_feature 1..18: note = Synthetic
  source 1..18: mol_type = other DNA
gggtaaacaggaggggcc

SEQ ID NO: 2513 - DNA, 18 bp, synthetic construct
  misc_feature 1..18: note = Synthetic
  source 1..18: mol_type = other DNA
gtaaacaggaggggccac

SEQ ID NO: 2514 - DNA, 18 bp, synthetic construct
  misc_feature 1..18: note = Synthetic
  source 1..18: mol_type = other DNA
aaacaggaggggccacat

SEQ ID NO: 2515 - DNA, 18 bp, synthetic construct
  misc_feature 1..18: note = Synthetic
  source 1..18: mol_type = other DNA
acaggaggggccacatgc

SEQ ID NO: 2516 - DNA, 18 bp, synthetic construct
  misc_feature 1..18: note = Synthetic
  source 1..18: mol_type = other DNA
aggaggggccacatgcac

SEQ ID NO: 2517 - DNA, 18 bp, synthetic construct
  misc_feature 1..18: note = Synthetic
  source 1..18: mol_type = other DNA
gaggggccacatgcacag

SEQ ID NO: 2518 - DNA, 18 bp, synthetic construct
  misc_feature 1..18: note = Synthetic
  source 1..18: mol_type = other DNA
ggggccacatgcacaggt

SEQ ID NO: 2519 - DNA, 18 bp, synthetic construct
  misc_feature 1..18: note = Synthetic
  source 1..18: mol_type = other DNA
ggccacatgcacaggtaa

SEQ ID NO: 2520 - DNA, 18 bp, synthetic construct
  misc_feature 1..18: note = Synthetic
  source 1..18: mol_type = other DNA
ccacatgcacaggtaatt

SEQ ID NO: 2521 - DNA, 18 bp, synthetic construct
  misc_feature 1..18: note = Synthetic
  source 1..18: mol_type = other DNA
acatgcacaggtaattca

SEQ ID NO: 2522 - DNA, 18 bp, synthetic construct
  misc_feature 1..18: note = Synthetic
  source 1..18: mol_type = other DNA
atgcacaggtaattcacc

SEQ ID NO: 2523 - DNA, 18 bp, synthetic construct
  misc_feature 1..18: note = Synthetic
  source 1..18: mol_type = other DNA
gcacaggtaattcaccag

SEQ ID NO: 2524 - DNA, 18 bp, synthetic construct
  misc_feature 1..18: note = Synthetic
  source 1..18: mol_type = other DNA
acaggtaattcaccaggg

SEQ ID NO: 2525 - DNA, 18 bp, synthetic construct
  misc_feature 1..18: note = Synthetic
  source 1..18: mol_type = other DNA
aggtaattcaccagggag

SEQ ID NO: 2526 - DNA, 18 bp, synthetic construct
  misc_feature 1..18: note = Synthetic
  source 1..18: mol_type = other DNA
gtaattcaccagggagcc

SEQ ID NO: 2527 - DNA, 18 bp, synthetic construct
  misc_feature 1..18: note = Synthetic
  source 1..18: mol_type = other DNA
aattcaccagggagccga

SEQ ID NO: 2528 - DNA, 18 bp, synthetic construct
  misc_feature 1..18: note = Synthetic
  source 1..18: mol_type = other DNA
ttcaccagggagccgaac

SEQ ID NO: 2529 - DNA, 18 bp, synthetic construct
  misc_feature 1..18: note = Synthetic
  source 1..18: mol_type = other DNA
caccagggagccgaacac

SEQ ID NO: 2530 - DNA, 18 bp, synthetic construct
  misc_feature 1..18: note = Synthetic
  source 1..18: mol_type = other DNA
ccagggagccgaacactc

SEQ ID NO: 2531 - DNA, 18 bp, synthetic construct
  misc_feature 1..18: note = Synthetic
  source 1..18: mol_type = other DNA
agggagccgaacactcct

SEQ ID NO: 2532 - DNA, 18 bp, synthetic construct
  misc_feature 1..18: note = Synthetic
  source 1..18: mol_type = other DNA
ggagccgaacactcctgt

SEQ ID NO: 2533 - DNA, 18 bp, synthetic construct
  misc_feature 1..18: note = Synthetic
  source 1..18: mol_type = other DNA
agccgaacactcctgtgc

SEQ ID NO: 2534 - DNA, 18 bp, synthetic construct
  misc_feature 1..18: note = Synthetic
  source 1..18: mol_type = other DNA
cccccgcagtggtatcca

SEQ ID NO: 2535 - DNA, 18 bp, synthetic construct
  misc_feature 1..18: note = Synthetic
  source 1..18: mol_type = other DNA
cccgcagtggtatccaca

SEQ ID NO: 2536 - DNA, 18 bp, synthetic construct
  misc_feature 1..18: note = Synthetic
  source 1..18: mol_type = other DNA
cgcagtggtatccacacc

SEQ ID NO: 2537 - DNA, 18 bp, synthetic construct
  misc_feature 1..18: note = Synthetic
  source 1..18: mol_type = other DNA
cctgttgcaccattccca

SEQ ID NO: 2538 - DNA, 18 bp, synthetic construct
  misc_feature 1..18: note = Synthetic
  source 1..18: mol_type = other DNA
tgttgcaccattcccagg

SEQ ID NO: 2539 - DNA, 18 bp, synthetic construct
  misc_feature 1..18: note = Synthetic
  source 1..18: mol_type = other DNA
ttgcaccattcccaggca

SEQ ID NO: 2540 - DNA, 18 bp, synthetic construct
  misc_feature 1..18: note = Synthetic
  source 1..18: mol_type = other DNA
gcaccattcccaggcact

SEQ ID NO: 2541 - DNA, 18 bp, synthetic construct
  misc_feature 1..18: note = Synthetic
  source 1..18: mol_type = other DNA
gtgacgtgttataggtgt

SEQ ID NO: 2542 - DNA, 18 bp, synthetic construct
  misc_feature 1..18: note = Synthetic
  source 1..18: mol_type = other DNA
gacgtgttataggtgtcc

SEQ ID NO: 2543 - DNA, 18 bp, synthetic construct
  misc_feature 1..18: note = Synthetic
  source 1..18: mol_type = other DNA
cgtgttataggtgtccct

SEQ ID NO: 2544 - DNA, 18 bp, synthetic construct
  misc_feature 1..18: note = Synthetic
  source 1..18: mol_type = other DNA
gaaatgacatgtcggctg

SEQ ID NO: 2545 - DNA, 18 bp, synthetic construct
  misc_feature 1..18: note = Synthetic
  source 1..18: mol_type = other DNA
aatgacatgtcggctggg

SEQ ID NO: 2546 - DNA, 18 bp, synthetic construct
  misc_feature 1..18: note = Synthetic
  source 1..18: mol_type = other DNA
tgacatgtcggctgggcg

SEQ ID NO: 2547 - DNA, 18 bp, synthetic construct
  misc_feature 1..18: note = Synthetic
  source 1..18: mol_type = other DNA
acatgtcggctgggcgtg

SEQ ID NO: 2548 - DNA, 18 bp, synthetic construct
  misc_feature 1..18: note = Synthetic
  source 1..18: mol_type = other DNA
atgtcggctgggcgtggt

SEQ ID NO: 2549 - DNA, 18 bp, synthetic construct
  misc_feature 1..18: note = Synthetic
  source 1..18: mol_type = other DNA
aagaaaaagaaatgccat

SEQ ID NO: 2550 - DNA, 18 bp, synthetic construct
  misc_feature 1..18: note = Synthetic
  source 1..18: mol_type = other DNA
gaaaaagaaatgccatgt

SEQ ID NO: 2551 - DNA, 18 bp, synthetic construct
  misc_feature 1..18: note = Synthetic
  source 1..18: mol_type = other DNA
aaaagaaatgccatgtaa

SEQ ID NO: 2552 - DNA, 18 bp, synthetic construct
  misc_feature 1..18: note = Synthetic
  source 1..18: mol_type = other DNA
aagaaatgccatgtaaat

SEQ ID NO: 2553 - DNA, 18 bp, synthetic construct
  misc_feature 1..18: note = Synthetic
  source 1..18: mol_type = other DNA
atgcacccatcgtaagcc

SEQ ID NO: 2554 - DNA, 18 bp, synthetic construct
  misc_feature 1..18: note = Synthetic
  source 1..18: mol_type = other DNA
gcacccatcgtaagccta

SEQ ID NO: 2555 - DNA, 18 bp, synthetic construct
  misc_feature 1..18: note = Synthetic
  source 1..18: mol_type = other DNA
acccatcgtaagcctaac

SEQ ID NO: 2556 - DNA, 18 bp, synthetic construct
  misc_feature 1..18: note = Synthetic
  source 1..18: mol_type = other DNA
ccatcgtaagcctaacta

SEQ ID NO: 2557 - DNA, 18 bp, synthetic construct
  misc_feature 1..18: note = Synthetic
  source 1..18: mol_type = other DNA
cattttcaggggtttttt

SEQ ID NO: 2558 - DNA, 18 bp, synthetic construct
  misc_feature 1..18: note = Synthetic
  source 1..18: mol_type = other DNA
ttttcaggggtttttttg

SEQ ID NO: 2559 - DNA, 18 bp, synthetic construct
  misc_feature 1..18: note = Synthetic
  source 1..18: mol_type = other DNA
ttcaggggtttttttgtt

SEQ ID NO: 2560 - DNA, 18 bp, synthetic construct
  misc_feature 1..18: note = Synthetic
  source 1..18: mol_type = other DNA
ccaccgcgcccaatatat

SEQ ID NO: 2561 - DNA, 18 bp, synthetic construct
  misc_feature 1..18: note = Synthetic
  source 1..18: mol_type = other DNA
accgcgcccaatatattt

SEQ ID NO: 2562 - DNA, 18 bp, synthetic construct
  misc_feature 1..18: note = Synthetic
  source 1..18: mol_type = other DNA
cgcgcccaatatattttg

SEQ ID NO: 2563 - DNA, 18 bp, synthetic construct
  misc_feature 1..18: note = Synthetic
  source 1..18: mol_type = other DNA
cgcccaatatattttgat

SEQ ID NO: 2564 - DNA, 18 bp, synthetic construct
  misc_feature 1..18: note = Synthetic
  source 1..18: mol_type = other DNA
gagggctgactgtactta

SEQ ID NO: 2565 - DNA, 18 bp, synthetic construct
  misc_feature 1..18: note = Synthetic
  source 1..18: mol_type = other DNA
gggctgactgtacttaac

SEQ ID NO: 2566 - DNA, 18 bp, synthetic construct
  misc_feature 1..18: note = Synthetic
  source 1..18: mol_type = other DNA
gctgactgtacttaacat

SEQ ID NO: 2567 - DNA, 18 bp, synthetic construct
  misc_feature 1..18: note = Synthetic
  source 1..18: mol_type = other DNA
aaaataaaggtgtggctg

SEQ ID NO: 2568 - DNA, 18 bp, synthetic construct
  misc_feature 1..18: note = Synthetic
  source 1..18: mol_type = other DNA
aataaaggtgtggctggg

SEQ ID NO: 2569 - DNA, 18 bp, synthetic construct
  misc_feature 1..18: note = Synthetic
  source 1..18: mol_type = other DNA
taaaggtgtggctgggtg

SEQ ID NO: 2570 - DNA, 18 bp, synthetic construct
  misc_feature 1..18: note = Synthetic
  source 1..18: mol_type = other DNA
aaggtgtggctgggtgtg

SEQ ID NO: 2571 - DNA, 18 bp, synthetic construct
  misc_feature 1..18: note = Synthetic
  source 1..18: mol_type = other DNA
ggtgtggctgggtgtggt

SEQ ID NO: 2572 - DNA, 18 bp, synthetic construct
  misc_feature 1..18: note = Synthetic
  source 1..18: mol_type = other DNA
aaaaaaaaaagggggtga

SEQ ID NO: 2573 - DNA, 18 bp, synthetic construct
  misc_feature 1..18: note = Synthetic
  source 1..18: mol_type = other DNA
aaaaaaaagggggtgagc

SEQ ID NO: 2574 - DNA, 18 bp, synthetic construct
  misc_feature 1..18: note = Synthetic
  source 1..18: mol_type = other DNA
aaaaaagggggtgagcag

SEQ ID NO: 2575 - DNA, 18 bp, synthetic construct
  misc_feature 1..18: note = Synthetic
  source 1..18: mol_type = other DNA
aaaagggggtgagcagac

SEQ ID NO: 2576 - DNA, 18 bp, synthetic construct
  misc_feature 1..18: note = Synthetic
  source 1..18: mol_type = other DNA
aagggggtgagcagacgt

SEQ ID NO: 2577 - DNA, 18 bp, synthetic construct
  misc_feature 1..18: note = Synthetic
  source 1..18: mol_type = other DNA
gggggtgagcagacgtgg

SEQ ID NO: 2578 - DNA, 18 bp, synthetic construct
  misc_feature 1..18: note = Synthetic
  source 1..18: mol_type = other DNA
gggtgagcagacgtggtg

SEQ ID NO: 2579 - DNA, 18 bp, synthetic construct
  misc_feature 1..18: note = Synthetic
  source 1..18: mol_type = other DNA
aataaaataaaagtaaag

SEQ ID NO: 2580 - DNA, 18 bp, synthetic construct
  misc_feature 1..18: note = Synthetic
  source 1..18: mol_type = other DNA
taaaataaaagtaaaggt

SEQ ID NO: 2581 - DNA, 18 bp, synthetic construct
  misc_feature 1..18: note = Synthetic
  source 1..18: mol_type = other DNA
aaataaaagtaaaggtat

SEQ ID NO: 2582 - DNA, 18 bp, synthetic construct
  misc_feature 1..18: note = Synthetic
  source 1..18: mol_type = other DNA
ataaaagtaaaggtatta

SEQ ID NO: 2583 - DNA, 18 bp, synthetic construct
  misc_feature 1..18: note = Synthetic
  source 1..18: mol_type = other DNA
caacagacattactgttt

SEQ ID NO: 2584 - DNA, 18 bp, synthetic construct
  misc_feature 1..18: note = Synthetic
  source 1..18: mol_type = other DNA
acagacattactgttttt

SEQ ID NO: 2585 - DNA, 18 bp, synthetic construct
  misc_feature 1..18: note = Synthetic
  source 1..18: mol_type = other DNA
agacattactgtttttgc

SEQ ID NO: 2586 - DNA, 18 bp, synthetic construct
  misc_feature 1..18: note = Synthetic
  source 1..18: mol_type = other DNA
acattactgtttttgctt

SEQ ID NO: 2587 - DNA, 18 bp, synthetic construct
  misc_feature 1..18: note = Synthetic
  source 1..18: mol_type = other DNA
agggtggcgtgggcttaa

SEQ ID NO: 2588 - DNA, 18 bp, synthetic construct
  misc_feature 1..18: note = Synthetic
  source 1..18: mol_type = other DNA
ggtggcgtgggcttaagc

SEQ ID NO: 2589 - DNA, 18 bp, synthetic construct
  misc_feature 1..18: note = Synthetic
  source 1..18: mol_type = other DNA
tggcgtgggcttaagcag

SEQ ID NO: 2590 - DNA, 18 bp, synthetic construct
  misc_feature 1..18: note = Synthetic
  source 1..18: mol_type = other DNA
gcgtgggcttaagcagtt

SEQ ID NO: 2591 - DNA, 18 bp, synthetic construct
  misc_feature 1..18: note = Synthetic
  source 1..18: mol_type = other DNA
gtgggcttaagcagttgc

SEQ ID NO: 2592 - DNA, 18 bp, synthetic construct
  misc_feature 1..18: note = Synthetic
  source 1..18: mol_type = other DNA
gggcttaagcagttgcca

SEQ ID NO: 2593 - DNA, 18 bp, synthetic construct
  misc_feature 1..18: note = Synthetic
  source 1..18: mol_type = other DNA
gcttaagcagttgccaga

SEQ ID NO: 2594 - DNA, 18 bp, synthetic construct
  misc_feature 1..18: note = Synthetic
  source 1..18: mol_type = other DNA
ttaagcagttgccagacg

SEQ ID NO: 2595 - DNA, 18 bp, synthetic construct
  misc_feature 1..18: note = Synthetic
  source 1..18: mol_type = other DNA
aagcagttgccagacgtt

SEQ ID NO: 2596 - DNA, 18 bp, synthetic construct
  misc_feature 1..18: note = Synthetic
  source 1..18: mol_type = other DNA
gcagttgccagacgttcc

SEQ ID NO: 2597 - DNA, 18 bp, synthetic construct
  misc_feature 1..18: note = Synthetic
  source 1..18: mol_type = other DNA
agttgccagacgttcctt

SEQ ID NO: 2598 - DNA, 18 bp, synthetic construct
  misc_feature 1..18: note = Synthetic
  source 1..18: mol_type = other DNA
ttgccagacgttccttgg

SEQ ID NO: 2599 - DNA, 18 bp, synthetic construct
  misc_feature 1..18: note = Synthetic
  source 1..18: mol_type = other DNA
gccagacgttccttggta

SEQ ID NO: 2600 - DNA, 18 bp, synthetic construct
  misc_feature 1..18: note = Synthetic
  source 1..18: mol_type = other DNA
cagacgttccttggtact

SEQ ID NO: 2601 - DNA, 18 bp, synthetic construct
  misc_feature 1..18: note = Synthetic
  source 1..18: mol_type = other DNA
gacgttccttggtacttt

SEQ ID NO: 2602 - DNA, 18 bp, synthetic construct
  misc_feature 1..18: note = Synthetic
  source 1..18: mol_type = other DNA
cgttccttggtactttgc

SEQ ID NO: 2603 - DNA, 18 bp, synthetic construct
  misc_feature 1..18: note = Synthetic
  source 1..18: mol_type = other DNA
ttccttggtactttgcag

SEQ ID NO: 2604 - DNA, 18 bp, synthetic construct
  misc_feature 1..18: note = Synthetic
  source 1..18: mol_type = other DNA
tgtggaccctggtgagct

SEQ ID NO: 2605 - DNA, 18 bp, synthetic construct
  misc_feature 1..18: note = Synthetic
  source 1..18: mol_type = other DNA
tggaccctggtgagctgg

SEQ ID NO: 2606 - DNA, 18 bp, synthetic construct
  misc_feature 1..18: note = Synthetic
  source 1..18: mol_type = other DNA
gaccctggtgagctgggt

SEQ ID NO: 2607 - DNA, 18 bp, synthetic construct
  misc_feature 1..18: note = Synthetic
  source 1..18: mol_type = other DNA
ccctggtgagctgggtgg

SEQ ID NO: 2608 - DNA, 18 bp, synthetic construct
  misc_feature 1..18: note = Synthetic
  source 1..18: mol_type = other DNA
ctggtgagctgggtggcc

SEQ ID NO: 2609 - DNA, 18 bp, synthetic construct
  misc_feature 1..18: note = Synthetic
  source 1..18: mol_type = other DNA
ggtgagctgggtggcctt

SEQ ID NO: 2610 - DNA, 18 bp, synthetic construct
  misc_feature 1..18: note = Synthetic
  source 1..18: mol_type = other DNA
tgagctgggtggccttaa

SEQ ID NO: 2611 - DNA, 18 bp, synthetic construct
  misc_feature 1..18: note = Synthetic
  source 1..18: mol_type = other DNA
agctgggtggccttaaca

SEQ ID NO: 2612 - DNA, 18 bp, synthetic construct
  misc_feature 1..18: note = Synthetic
  source 1..18: mol_type = other DNA
ctgggtggccttaacagc

SEQ ID NO: 2613 - DNA, 18 bp, synthetic construct
  misc_feature 1..18: note = Synthetic
  source 1..18: mol_type = other DNA
gggtggccttaacagcag

SEQ ID NO: 2614 - DNA, 18 bp, synthetic construct
  misc_feature 1..18: note = Synthetic
  source 1..18: mol_type = other DNA
gtggccttaacagcaggg

SEQ ID NO: 2615 - DNA, 18 bp, synthetic construct
  misc_feature 1..18: note = Synthetic
  source 1..18: mol_type = other DNA
ggccttaacagcagggct

SEQ ID NO: 2616 - DNA, 18 bp, synthetic construct
  misc_feature 1..18: note = Synthetic
  source 1..18: mol_type = other DNA
ccttaacagcagggctgg

SEQ ID NO: 2617 - DNA, 18 bp, synthetic construct
  misc_feature 1..18: note = Synthetic
  source 1..18: mol_type = other DNA
ttaacagcagggctggtg

SEQ ID NO: 2618 - DNA, 18 bp, synthetic construct
  misc_feature 1..18: note = Synthetic
  source 1..18: mol_type = other DNA
aacagcagggctggtggc

SEQ ID NO: 2619 - DNA, 18 bp, synthetic construct
  misc_feature 1..18: note = Synthetic
  source 1..18: mol_type = other DNA
cagcagggctggtggctg

SEQ ID NO: 2620 - DNA, 18 bp, synthetic construct
  misc_feature 1..18: note = Synthetic
  source 1..18: mol_type = other DNA
gcagggctggtggctgga

SEQ ID NO: 2621 - DNA, 18 bp, synthetic construct
  misc_feature 1..18: note = Synthetic
  source 1..18: mol_type = other DNA
agggctggtggctggaac

SEQ ID NO: 2622 - DNA, 18 bp, synthetic construct
  misc_feature 1..18: note = Synthetic
  source 1..18: mol_type = other DNA
ggctggtggctggaacgc

SEQ ID NO: 2623 - DNA, 18 bp, synthetic construct
  misc_feature 1..18: note = Synthetic
  source 1..18: mol_type = other DNA
ctggtggctggaacgcgg

SEQ ID NO: 2624 - DNA, 18 bp, synthetic construct
  misc_feature 1..18: note = Synthetic
  source 1..18: mol_type = other DNA
ggtggctggaacgcggtg

SEQ ID NO: 2625 - DNA, 18 bp, synthetic construct
  misc_feature 1..18: note = Synthetic
  source 1..18: mol_type = other DNA
tggctggaacgcggtgcc

SEQ ID NO: 2626 - DNA, 18 bp, synthetic construct
  misc_feature 1..18: note = Synthetic
  source 1..18: mol_type = other DNA
gctggaacgcggtgccca

SEQ ID NO: 2627 - DNA, 18 bp, synthetic construct
  misc_feature 1..18: note = Synthetic
  source 1..18: mol_type = other DNA
tggaacgcggtgcccaga

SEQ ID NO: 2628 - DNA, 18 bp, synthetic construct
  misc_feature 1..18: note = Synthetic
  source 1..18: mol_type = other DNA
gaacgcggtgcccagatg

SEQ ID NO: 2629 - DNA, 18 bp, synthetic construct
  misc_feature 1..18: note = Synthetic
  source 1..18: mol_type = other DNA
acgcggtgcccagatggt

SEQ ID NO: 2630 - DNA, 18 bp, synthetic construct
  misc_feature 1..18: note = Synthetic
  source 1..18: mol_type = other DNA
gcggtgcccagatggtca

SEQ ID NO: 2631 - DNA, 18 bp, synthetic construct
  misc_feature 1..18: note = Synthetic
  source 1..18: mol_type = other DNA
ggtgcccagatggtcagt

SEQ ID NO: 2632 - DNA, 18 bp, synthetic construct
  misc_feature 1..18: note = Synthetic
  source 1..18: mol_type = other DNA
tgcccagatggtcagttc

SEQ ID NO: 2633 - DNA, 18 bp, synthetic construct
  misc_feature 1..18: note = Synthetic
  source 1..18: mol_type = other DNA
cccagatggtcagttctg

SEQ ID NO: 2634 - DNA, 18 bp, synthetic construct
  misc_feature 1..18: note = Synthetic
  source 1..18: mol_type = other DNA
cagatggtcagttctgcc

SEQ ID NO: 2635 - DNA, 18 bp, synthetic construct
  misc_feature 1..18: note = Synthetic
  source 1..18: mol_type = other DNA
gatggtcagttctgccct

SEQ ID NO: 2636 - DNA, 18 bp, synthetic construct
  misc_feature 1..18: note = Synthetic
  source 1..18: mol_type = other DNA
tggtcagttctgccctgt

SEQ ID NO: 2637 - DNA, 18 bp, synthetic construct
  misc_feature 1..18: note = Synthetic
  source 1..18: mol_type = other DNA
gtcagttctgccctgtgg

SEQ ID NO: 2638 - DNA, 18 bp, synthetic construct
  misc_feature 1..18: note = Synthetic
  source 1..18: mol_type = other DNA
cagttctgccctgtggcc

SEQ ID NO: 2639 - DNA, 18 bp, synthetic construct
  misc_feature 1..18: note = Synthetic
  source 1..18: mol_type = other DNA
gttctgccctgtggcctg

SEQ ID NO: 2640 - DNA, 18 bp, synthetic construct
  misc_feature 1..18: note = Synthetic
  source 1..18: mol_type = other DNA
tctgccctgtggcctgct

SEQ ID NO: 2641 - DNA, 18 bp, synthetic construct
  misc_feature 1..18: note = Synthetic
  source 1..18: mol_type = other DNA
tgccctgtggcctgctgc

SEQ ID NO: 2642 - DNA, 18 bp, synthetic construct
  misc_feature 1..18: note = Synthetic
  source 1..18: mol_type = other DNA
ccctgtggcctgctgcct

SEQ ID NO: 2643 - DNA, 18 bp, synthetic construct
  misc_feature 1..18: note = Synthetic
  source 1..18: mol_type = other DNA
ctgtggcctgctgcctgg

SEQ ID NO: 2644 - DNA, 18 bp, synthetic construct
  misc_feature 1..18: note = Synthetic
  source 1..18: mol_type = other DNA
gtggcctgctgcctggac

SEQ ID NO: 2645 - DNA, 18 bp, synthetic construct
  misc_feature 1..18: note = Synthetic
  source 1..18: mol_type = other DNA
ggcctgctgcctggaccc

SEQ ID NO: 2646 - DNA, 18 bp, synthetic construct
  misc_feature 1..18: note = Synthetic
  source 1..18: mol_type = other DNA
cctgctgcctggaccccg

SEQ ID NO: 2647 - DNA, 18 bp, synthetic construct
  misc_feature 1..18: note = Synthetic
  source 1..18: mol_type = other DNA
tgctgcctggaccccgga

SEQ ID NO: 2648 - DNA, 18 bp, synthetic construct
  misc_feature 1..18: note = Synthetic
  source 1..18: mol_type = other DNA
ctgcctggaccccggagg

SEQ ID NO: 2649 - DNA, 18 bp, synthetic construct
  misc_feature 1..18: note = Synthetic
  source 1..18: mol_type = other DNA
gcctggaccccggaggag

SEQ ID NO: 2650 - DNA, 18 bp, synthetic construct
  misc_feature 1..18: note = Synthetic
  source 1..18: mol_type = other DNA
ctggaccccggaggagcc

SEQ ID NO: 2651 - DNA, 18 bp, synthetic construct
  misc_feature 1..18: note = Synthetic
  source 1..18: mol_type = other DNA
ggaccccggaggagccag

SEQ ID NO: 2652 - DNA, 18 bp, synthetic construct
  misc_feature 1..18: note = Synthetic
  source 1..18: mol_type = other DNA
accccggaggagccagct

SEQ ID NO: 2653 - DNA, 18 bp, synthetic construct
  misc_feature 1..18: note = Synthetic
  source 1..18: mol_type = other DNA
cccggaggagccagctac

SEQ ID NO: 2654 - DNA, 18 bp, synthetic construct
  misc_feature 1..18: note = Synthetic
  source 1..18: mol_type = other DNA
cggaggagccagctacag

SEQ ID NO: 2655 - DNA, 18 bp, synthetic construct
  misc_feature 1..18: note = Synthetic
  source 1..18: mol_type = other DNA
gaggagccagctacagct

SEQ ID NO: 2656 - DNA, 18 bp, synthetic construct
  misc_feature 1..18: note = Synthetic
  source 1..18: mol_type = other DNA
ggagccagctacagctgc

SEQ ID NO: 2657 - DNA, 18 bp, synthetic construct
  misc_feature 1..18: note = Synthetic
  source 1..18: mol_type = other DNA
agccagctacagctgctg

SEQ ID NO: 2658 - DNA, 18 bp, synthetic construct
  misc_feature 1..18: note = Synthetic
  source 1..18: mol_type = other DNA
ccagctacagctgctgcc

SEQ ID NO: 2659 - DNA, 18 bp, synthetic construct
  misc_feature 1..18: note = Synthetic
  source 1..18: mol_type = other DNA
agctacagctgctgccgt

SEQ ID NO: 2660 - DNA, 18 bp, synthetic construct
  misc_feature 1..18: note = Synthetic
  source 1..18: mol_type = other DNA
ctacagctgctgccgtcc

SEQ ID NO: 2661 - DNA, 18 bp, synthetic construct
  misc_feature 1..18: note = Synthetic
  source 1..18: mol_type = other DNA
acagctgctgccgtcccc

SEQ ID NO: 2662 - DNA, 18 bp, synthetic construct
  misc_feature 1..18: note = Synthetic
  source 1..18: mol_type = other DNA
agctgctgccgtcccctt

SEQ ID NO: 2663 - DNA, 18 bp, synthetic construct
  misc_feature 1..18: note = Synthetic
  source 1..18: mol_type = other DNA
ctgctgccgtccccttct

SEQ ID NO: 2664 - DNA, 18 bp, synthetic construct
  misc_feature 1..18: note = Synthetic
  source 1..18: mol_type = other DNA
gctgccgtccccttctgg

SEQ ID NO: 2665 - DNA, 18 bp, synthetic construct
  misc_feature 1..18: note = Synthetic
  source 1..18: mol_type = other DNA
tgccgtccccttctggtg

SEQ ID NO: 2666 - DNA, 18 bp, synthetic construct
  misc_feature 1..18: note = Synthetic
  source 1..18: mol_type = other DNA
ccgtccccttctggtgag

SEQ ID NO: 2667 - DNA, 18 bp, synthetic construct
  misc_feature 1..18: note = Synthetic
  source 1..18: mol_type = other DNA
gtccccttctggtgagtg

SEQ ID NO: 2668 - DNA, 18 bp, synthetic construct
  misc_feature 1..18: note = Synthetic
  source 1..18: mol_type = other DNA
ccccttctggtgagtgcc

SEQ ID NO: 2669 - DNA, 18 bp, synthetic construct
  misc_feature 1..18: note = Synthetic
  source 1..18: mol_type = other DNA
ccttctggtgagtgcccc

SEQ ID NO: 2670 - DNA, 18 bp, synthetic construct
  misc_feature 1..18: note = Synthetic
  source 1..18: mol_type = other DNA
ttctggtgagtgcccctc

SEQ ID NO: 2671 - DNA, 18 bp, synthetic construct
  misc_feature 1..18: note = Synthetic
  source 1..18: mol_type = other DNA
ctggtgagtgcccctcag

SEQ ID NO: 2672 - DNA, 18 bp, synthetic construct
  misc_feature 1..18: note = Synthetic
  source 1..18: mol_type = other DNA
ggtgagtgcccctcagcc

SEQ ID NO: 2673 - DNA, 18 bp, synthetic construct
  misc_feature 1..18: note = Synthetic
  source 1..18: mol_type = other DNA
tgagtgcccctcagccta

SEQ ID NO: 2674 - DNA, 18 bp, synthetic construct
  misc_feature 1..18: note = Synthetic
  source 1..18: mol_type = other DNA
agtgcccctcagcctagg

SEQ ID NO: 2675 - DNA, 18 bp, synthetic construct
  misc_feature 1..18: note = Synthetic
  source 1..18: mol_type = other DNA
tgcccctcagcctaggca

SEQ ID NO: 2676 - DNA, 18 bp, synthetic construct
  misc_feature 1..18: note = Synthetic
  source 1..18: mol_type = other DNA
cccctcagcctaggcaag

SEQ ID NO: 2677 - DNA, 18 bp, synthetic construct
  misc_feature 1..18: note = Synthetic
  source 1..18: mol_type = other DNA
cctcagcctaggcaagag

SEQ ID NO: 2678 - DNA, 18 bp, synthetic construct
  misc_feature 1..18: note = Synthetic
  source 1..18: mol_type = other DNA
tcagcctaggcaagagct

SEQ ID NO: 2679 - DNA, 18 bp, synthetic construct
  misc_feature 1..18: note = Synthetic
  source 1..18: mol_type = other DNA
agcctaggcaagagctgg

SEQ ID NO: 2680 - DNA, 18 bp, synthetic construct
  misc_feature 1..18: note = Synthetic
  source 1..18: mol_type = other DNA
cctaggcaagagctggca

SEQ ID NO: 2681 - DNA, 18 bp, synthetic construct
  misc_feature 1..18: note = Synthetic
  source 1..18: mol_type = other DNA
taggcaagagctggcagc

SEQ ID NO: 2682 - DNA, 18 bp, synthetic construct
  misc_feature 1..18: note = Synthetic
  source 1..18: mol_type = other DNA
ggcaagagctggcagcct

SEQ ID NO: 2683 - DNA, 18 bp, synthetic construct
  misc_feature 1..18: note = Synthetic
  source 1..18: mol_type = other DNA
caagagctggcagcctgg

SEQ ID NO: 2684 - DNA, 18 bp, synthetic construct
  misc_feature 1..18: note = Synthetic
  source 1..18: mol_type = other DNA
agagctggcagcctgggt

SEQ ID NO: 2685 - DNA, 18 bp, synthetic construct
  misc_feature 1..18: note = Synthetic
  source 1..18: mol_type = other DNA
agctggcagcctgggttt

SEQ ID NO: 2686 - DNA, 18 bp, synthetic construct
  misc_feature 1..18: note = Synthetic
  source 1..18: mol_type = other DNA
ctggcagcctgggttttc

SEQ ID NO: 2687 - DNA, 18 bp, synthetic construct
  misc_feature 1..18: note = Synthetic
  source 1..18: mol_type = other DNA
ggcagcctgggttttccc

SEQ ID NO: 2688 - DNA, 18 bp, synthetic construct
  misc_feature 1..18: note = Synthetic
  source 1..18: mol_type = other DNA
cagcctgggttttcccaa

SEQ ID NO: 2689 - DNA, 18 bp, synthetic construct
  misc_feature 1..18: note = Synthetic
  source 1..18: mol_type = other DNA
gcctgggttttcccaaag

SEQ ID NO: 2690 - DNA, 18 bp, synthetic construct
  misc_feature 1..18: note = Synthetic
  source 1..18: mol_type = other DNA
gaggacgccaggcacaag

SEQ ID NO: 2691 - DNA, 18 bp, synthetic construct
  misc_feature 1..18: note = Synthetic
  source 1..18: mol_type = other DNA
ggacgccaggcacaagtc

SEQ ID NO: 2692 - DNA, 18 bp, synthetic construct
  misc_feature 1..18: note = Synthetic
  source 1..18: mol_type = other DNA
acgccaggcacaagtctg

SEQ ID NO: 2693 - DNA, 18 bp, synthetic construct
  misc_feature 1..18: note = Synthetic
  source 1..18: mol_type = other DNA
gccaggcacaagtctgtg

SEQ ID NO: 2694 - DNA, 18 bp, synthetic construct
  misc_feature 1..18: note = Synthetic
  source 1..18: mol_type = other DNA
caggcacaagtctgtggt

SEQ ID NO: 2695 - DNA, 18 bp, synthetic construct
  misc_feature 1..18: note = Synthetic
  source 1..18: mol_type = other DNA
ggcacaagtctgtggttt

SEQ ID NO: 2696 - DNA, 18 bp, synthetic construct
  misc_feature 1..18: note = Synthetic
  source 1..18: mol_type = other DNA
cacaagtctgtggtttat

SEQ ID NO: 2697 - DNA, 18 bp, synthetic construct
  misc_feature 1..18: note = Synthetic
  source 1..18: mol_type = other DNA
caagtctgtggtttatca

SEQ ID NO: 2698 - DNA, 18 bp, synthetic construct
  misc_feature 1..18: note = Synthetic
  source 1..18: mol_type = other DNA
agtctgtggtttatcatt

SEQ ID NO: 2699 - DNA, 18 bp, synthetic construct
  misc_feature 1..18: note = Synthetic
  source 1..18: mol_type = other DNA
tctgtggtttatcatttt

SEQ ID NO: 2700 - DNA, 18 bp, synthetic construct
  misc_feature 1..18: note = Synthetic
  source 1..18: mol_type = other DNA
tgtggtttatcattttcc

SEQ ID NO: 2701 - DNA, 18 bp, synthetic construct
  misc_feature 1..18: note = Synthetic
  source 1..18: mol_type = other DNA
tggtttatcattttccct

SEQ ID NO: 2702 - DNA, 18 bp, synthetic construct
  misc_feature 1..18: note = Synthetic
  source 1..18: mol_type = other DNA
gtttatcattttccctgt

SEQ ID NO: 2703 - DNA, 18 bp, synthetic construct
  misc_feature 1..18: note = Synthetic
  source 1..18: mol_type = other DNA
ttatcattttccctgtct

SEQ ID NO: 2704 - DNA, 18 bp, synthetic construct
  misc_feature 1..18: note = Synthetic
  source 1..18: mol_type = other DNA
atcattttccctgtcttt

SEQ ID NO: 2705 - DNA, 18 bp, synthetic construct
  misc_feature 1..18: note = Synthetic
  source 1..18: mol_type = other DNA
cattttccctgtctttct

SEQ ID NO: 2706 - DNA, 18 bp, synthetic construct
  misc_feature 1..18: note = Synthetic
  source 1..18: mol_type = other DNA
ttttccctgtctttctag

SEQ ID NO: 2707 - DNA, 18 bp, synthetic construct
  misc_feature 1..18: note = Synthetic
  source 1..18: mol_type = other DNA
ttccctgtctttctagga

SEQ ID NO: 2708 - DNA, 18 bp, synthetic construct
  misc_feature 1..18: note = Synthetic
  source 1..18: mol_type = other DNA
ccctgtctttctaggaca

SEQ ID NO: 2709 - DNA, 18 bp, synthetic construct
  misc_feature 1..18: note = Synthetic
  source 1..18: mol_type = other DNA
ctgtctttctaggacaaa

SEQ ID NO: 2710 - DNA, 18 bp, synthetic construct
  misc_feature 1..18: note = Synthetic
  source 1..18: mol_type = other DNA
gtctttctaggacaaatg

SEQ ID NO: 2711 - DNA, 18 bp, synthetic construct
  misc_feature 1..18: note = Synthetic
  source 1..18: mol_type = other DNA
ctttctaggacaaatggc

SEQ ID NO: 2712 - DNA, 18 bp, synthetic construct
  misc_feature 1..18: note = Synthetic
  source 1..18: mol_type = other DNA
ttctaggacaaatggccc

SEQ ID NO: 2713 - DNA, 18 bp, synthetic construct
  misc_feature 1..18: note = Synthetic
  source 1..18: mol_type = other DNA
ctaggacaaatggcccac

SEQ ID NO: 2714 - DNA, 18 bp, synthetic construct
  misc_feature 1..18: note = Synthetic
  source 1..18: mol_type = other DNA
aggacaaatggcccacaa

SEQ ID NO: 2715 - DNA, 18 bp, synthetic construct
  misc_feature 1..18: note = Synthetic
  source 1..18: mol_type = other DNA
gacaaatggcccacaaca

SEQ ID NO: 2716 - DNA, 18 bp, synthetic construct
  misc_feature 1..18: note = Synthetic
  source 1..18: mol_type = other DNA
caaatggcccacaacact

SEQ ID NO: 2717 - DNA, 18 bp, synthetic construct
  misc_feature 1..18: note = Synthetic
  source 1..18: mol_type = other DNA
aatggcccacaacactga

SEQ ID NO: 2718 - DNA, 18 bp, synthetic construct
  misc_feature 1..18: note = Synthetic
  source 1..18: mol_type = other DNA
tggcccacaacactgagc

SEQ ID NO: 2719 - DNA, 18 bp, synthetic construct
  misc_feature 1..18: note = Synthetic
  source 1..18: mol_type = other DNA
gcccacaacactgagcag

SEQ ID NO: 2720 - DNA, 18 bp, synthetic construct
  misc_feature 1..18: note = Synthetic
  source 1..18: mol_type = other DNA
ccacaacactgagcaggc

SEQ ID NO: 2721 - DNA, 18 bp, synthetic construct
  misc_feature 1..18: note = Synthetic
  source 1..18: mol_type = other DNA
acaacactgagcaggcat

SEQ ID NO: 2722 - DNA, 18 bp, synthetic construct
  misc_feature 1..18: note = Synthetic
  source 1..18: mol_type = other DNA
aacactgagcaggcatct

SEQ ID NO: 2723 - DNA, 18 bp, synthetic construct
  misc_feature 1..18: note = Synthetic
  source 1..18: mol_type = other DNA
cactgagcaggcatctgg

SEQ ID NO: 2724 - DNA, 18 bp, synthetic construct
  misc_feature 1..18: note = Synthetic
  source 1..18: mol_type = other DNA
ctgagcaggcatctgggt

SEQ ID NO: 2725 - DNA, 18 bp, synthetic construct
  misc_feature 1..18: note = Synthetic
  source 1..18: mol_type = other DNA
gagcaggcatctgggtgg

SEQ ID NO: 2726 - DNA, 18 bp, synthetic construct
  misc_feature 1..18: note = Synthetic
  source 1..18: mol_type = other DNA
gcaggcatctgggtggcc

SEQ ID NO: 2727 - DNA, 18 bp, synthetic construct
  misc_feature 1..18: note = Synthetic
  source 1..18: mol_type = other DNA
aggcatctgggtggcccc

SEQ ID NO: 2728 - DNA, 18 bp, synthetic construct
  misc_feature 1..18: note = Synthetic
  source 1..18: mol_type = other DNA
gcatctgggtggcccctg

SEQ ID NO: 2729 - DNA, 18 bp, synthetic construct
  misc_feature 1..18: note = Synthetic
  source 1..18: mol_type = other DNA
atctgggtggcccctgcc

SEQ ID NO: 2730 - DNA, 18 bp, synthetic construct
  misc_feature 1..18: note = Synthetic
  source 1..18: mol_type = other DNA
ctgggtggcccctgccag

SEQ ID NO: 2731 - DNA, 18 bp, synthetic construct
  misc_feature 1..18: note = Synthetic
  source 1..18: mol_type = other DNA
gggtggcccctgccaggt

SEQ ID NO: 2732 - DNA, 18 bp, synthetic construct
  misc_feature 1..18: note = Synthetic
  source 1..18: mol_type = other DNA
gtggcccctgccaggttg

SEQ ID NO: 2733 - DNA, 18 bp, synthetic construct
  misc_feature 1..18: note = Synthetic
  source 1..18: mol_type = other DNA
ggcccctgccaggttgat

SEQ ID NO: 2734 - DNA, 18 bp, synthetic construct
  misc_feature 1..18: note = Synthetic
  source 1..18: mol_type = other DNA
cccctgccaggttgatgc

SEQ ID NO: 2735 - DNA, 18 bp, synthetic construct
  misc_feature 1..18: note = Synthetic
  source 1..18: mol_type = other DNA
cctgccaggttgatgccc

SEQ ID NO: 2736 - DNA, 18 bp, synthetic construct
  misc_feature 1..18: note = Synthetic
  source 1..18: mol_type = other DNA
tgccaggttgatgcccac

SEQ ID NO: 2737 - DNA, 18 bp, synthetic construct
  misc_feature 1..18: note = Synthetic
  source 1..18: mol_type = other DNA
ccaggttgatgcccactg

SEQ ID NO: 2738 - DNA, 18 bp, synthetic construct
  misc_feature 1..18: note = Synthetic
  source 1..18: mol_type = other DNA
aggttgatgcccactgct

SEQ ID NO: 2739 - DNA, 18 bp, synthetic construct
  misc_feature 1..18: note = Synthetic
  source 1..18: mol_type = other DNA
gttgatgcccactgctct

SEQ ID NO: 2740 - DNA, 18 bp, synthetic construct
  misc_feature 1..18: note = Synthetic
  source 1..18: mol_type = other DNA
tgatgcccactgctctgc

SEQ ID NO: 2741 - DNA, 18 bp, synthetic construct
  misc_feature 1..18: note = Synthetic
  source 1..18: mol_type = other DNA
atgcccactgctctgccg

SEQ ID NO: 2742 - DNA, 18 bp, synthetic construct
  misc_feature 1..18: note = Synthetic
  source 1..18: mol_type = other DNA
gcccactgctctgccggc

SEQ ID NO: 2743 - DNA, 18 bp, synthetic construct
  misc_feature 1..18: note = Synthetic
  source 1..18: mol_type = other DNA
ccactgctctgccggcca

SEQ ID NO: 2744 - DNA, 18 bp, synthetic construct
  misc_feature 1..18: note = Synthetic
  source 1..18: mol_type = other DNA
actgctctgccggccact

SEQ ID NO: 2745 - DNA, 18 bp, synthetic construct
  misc_feature 1..18: note = Synthetic
  source 1..18: mol_type = other DNA
tgctctgccggccactcc

SEQ ID NO: 2746 - DNA, 18 bp, synthetic construct
  misc_feature 1..18: note = Synthetic
  source 1..18: mol_type = other DNA
ctctgccggccactcctg

SEQ ID NO: 2747 - DNA, 18 bp, synthetic construct
  misc_feature 1..18: note = Synthetic
  source 1..18: mol_type = other DNA
ctgccggccactcctgca

SEQ ID NO: 2748 - DNA, 18 bp, synthetic construct
  misc_feature 1..18: note = Synthetic
  source 1..18: mol_type = other DNA
gccggccactcctgcatc

SEQ ID NO: 2749 - DNA, 18 bp, synthetic construct
  misc_feature 1..18: note = Synthetic
  source 1..18: mol_type = other DNA
cggccactcctgcatctt

SEQ ID NO: 2750 - DNA, 18 bp, synthetic construct
  misc_feature 1..18: note = Synthetic
  source 1..18: mol_type = other DNA
gccactcctgcatcttta

SEQ ID NO: 2751 - DNA, 18 bp, synthetic construct
  misc_feature 1..18: note = Synthetic
  source 1..18: mol_type = other DNA
cactcctgcatctttacc

SEQ ID NO: 2752 - DNA, 18 bp, synthetic construct
  misc_feature 1..18: note = Synthetic
  source 1..18: mol_type = other DNA
ctcctgcatctttaccgt

SEQ ID NO: 2753 - DNA, 18 bp, synthetic construct
  misc_feature 1..18: note = Synthetic
  source 1..18: mol_type = other DNA
cctgcatctttaccgtct

SEQ ID NO: 2754 - DNA, 18 bp, synthetic construct
  misc_feature 1..18: note = Synthetic
  source 1..18: mol_type = other DNA
tgcatctttaccgtctca

SEQ ID NO: 2755 - DNA, 18 bp, synthetic construct
  misc_feature 1..18: note = Synthetic
  source 1..18: mol_type = other DNA
catctttaccgtctcagg

SEQ ID NO: 2756 - DNA, 18 bp, synthetic construct
  misc_feature 1..18: note = Synthetic
  source 1..18: mol_type = other DNA
tctttaccgtctcaggga

SEQ ID NO: 2757 - DNA, 18 bp, synthetic construct
  misc_feature 1..18: note = Synthetic
  source 1..18: mol_type = other DNA
tttaccgtctcagggact

SEQ ID NO: 2758 - DNA, 18 bp, synthetic construct
  misc_feature 1..18: note = Synthetic
  source 1..18: mol_type = other DNA
taccgtctcagggacttc

SEQ ID NO: 2759 - DNA, 18 bp, synthetic construct
  misc_feature 1..18: note = Synthetic
  source 1..18: mol_type = other DNA
ccgtctcagggacttcca

SEQ ID NO: 2760 - DNA, 18 bp, synthetic construct
  misc_feature 1..18: note = Synthetic
  source 1..18: mol_type = other DNA
gtctcagggacttccagt

SEQ ID NO: 2761 - DNA, 18 bp, synthetic construct
  misc_feature 1..18: note = Synthetic
  source 1..18: mol_type = other DNA
ctcagggacttccagttg

SEQ ID NO: 2762 - DNA, 18 bp, synthetic construct
  misc_feature 1..18: note = Synthetic
  source 1..18: mol_type = other DNA
cagggacttccagttgct

SEQ ID NO: 2763 - DNA, 18 bp, synthetic construct
  misc_feature 1..18: note = Synthetic
  source 1..18: mol_type = other DNA
gggacttccagttgctgc

SEQ ID NO: 2764 - DNA, 18 bp, synthetic construct
  misc_feature 1..18: note = Synthetic
  source 1..18: mol_type = other DNA
gacttccagttgctgccc

SEQ ID NO: 2765 - DNA, 18 bp, synthetic construct
  misc_feature 1..18: note = Synthetic
  source 1..18: mol_type = other DNA
cttccagttgctgcccct

SEQ ID NO: 2766 - DNA, 18 bp, synthetic construct
  misc_feature 1..18: note = Synthetic
  source 1..18: mol_type = other DNA
tccagttgctgccccttc

SEQ ID NO: 2767 - DNA, 18 bp, synthetic construct
  misc_feature 1..18: note = Synthetic
  source 1..18: mol_type = other DNA
cagttgctgccccttccc

SEQ ID NO: 2768 - DNA, 18 bp, synthetic construct
  misc_feature 1..18: note = Synthetic
  source 1..18: mol_type = other DNA
gttgctgccccttcccag

SEQ ID NO: 2769 - DNA, 18 bp, synthetic construct
  misc_feature 1..18: note = Synthetic
  source 1..18: mol_type = other DNA
tgctgccccttcccagag

SEQ ID NO: 2770 - DNA, 18 bp, synthetic construct
  misc_feature 1..18: note = Synthetic
  source 1..18: mol_type = other DNA
ctgccccttcccagaggt

SEQ ID NO: 2771 - DNA, 18 bp, synthetic construct
  misc_feature 1..18: note = Synthetic
  source 1..18: mol_type = other DNA
gccccttcccagaggtga

SEQ ID NO: 2772 - DNA, 18 bp, synthetic construct
  misc_feature 1..18: note = Synthetic
  source 1..18: mol_type = other DNA
cccttcccagaggtgagc

SEQ ID NO: 2773 - DNA, 18 bp, synthetic construct
  misc_feature 1..18: note = Synthetic
  source 1..18: mol_type = other DNA
cttcccagaggtgagcgt

SEQ ID NO: 2774 - DNA, 18 bp, synthetic construct
  misc_feature 1..18: note = Synthetic
  source 1..18: mol_type = other DNA
tcccagaggtgagcgtgc

SEQ ID NO: 2775 - DNA, 18 bp, synthetic construct
  misc_feature 1..18: note = Synthetic
  source 1..18: mol_type = other DNA
ccagaggtgagcgtgcca

SEQ ID NO: 2776 - DNA, 18 bp, synthetic construct
  misc_feature 1..18: note = Synthetic
  source 1..18: mol_type = other DNA
agaggtgagcgtgccatc

SEQ ID NO: 2777 - DNA, 18 bp, synthetic construct
  misc_feature 1..18: note = Synthetic
  source 1..18: mol_type = other DNA
aggtgagcgtgccatcag

SEQ ID NO: 2778 - DNA, 18 bp, synthetic construct
  misc_feature 1..18: note = Synthetic
  source 1..18: mol_type = other DNA
gtgagcgtgccatcagcc

SEQ ID NO: 2779 - DNA, 18 bp, synthetic construct
  misc_feature 1..18: note = Synthetic
  source 1..18: mol_type = other DNA
gagcgtgccatcagccca

SEQ ID NO: 2780 - DNA, 18 bp, synthetic construct
  misc_feature 1..18: note = Synthetic
  source 1..18: mol_type = other DNA
gcgtgccatcagcccagt

SEQ ID NO: 2781 - DNA, 18 bp, synthetic construct
  misc_feature 1..18: note = Synthetic
  source 1..18: mol_type = other DNA
gtgccatcagcccagtgg

SEQ ID NO: 2782 - DNA, 18 bp, synthetic construct
  misc_feature 1..18: note = Synthetic
  source 1..18: mol_type = other DNA
gccatcagcccagtggag

SEQ ID NO: 2783 - DNA, 18 bp, synthetic construct
  misc_feature 1..18: note = Synthetic
  source 1..18: mol_type = other DNA
catcagcccagtggaggg

SEQ ID NO: 2784 - DNA, 18 bp, synthetic construct
  misc_feature 1..18: note = Synthetic
  source 1..18: mol_type = other DNA
tcagcccagtggaggggc

SEQ ID NO: 2785 - DNA, 18 bp, synthetic construct
  misc_feature 1..18: note = Synthetic
  source 1..18: mol_type = other DNA
agcccagtggaggggctt

SEQ ID NO: 2786 - DNA, 18 bp, synthetic construct
  misc_feature 1..18: note = Synthetic
  source 1..18: mol_type = other DNA
cccagtggaggggcttag

SEQ ID NO: 2787 - DNA, 18 bp, synthetic construct
  misc_feature 1..18: note = Synthetic
  source 1..18: mol_type = other DNA
cagtggaggggcttaggt

SEQ ID NO: 2788 - DNA, 18 bp, synthetic construct
  misc_feature 1..18: note = Synthetic
  source 1..18: mol_type = other DNA
gtggaggggcttaggtct

SEQ ID NO: 2789 - DNA, 18 bp, synthetic construct
  misc_feature 1..18: note = Synthetic
  source 1..18: mol_type = other DNA
ggaggggcttaggtctgc

SEQ ID NO: 2790 - DNA, 18 bp, synthetic construct
  misc_feature 1..18: note = Synthetic
  source 1..18: mol_type = other DNA
aggggcttaggtctgcat

SEQ ID NO: 2791 - DNA, 18 bp, synthetic construct
  misc_feature 1..18: note = Synthetic
  source 1..18: mol_type = other DNA
gggcttaggtctgcattt

SEQ ID NO: 2792 - DNA, 18 bp, synthetic construct
  misc_feature 1..18: note = Synthetic
  source 1..18: mol_type = other DNA
gcttaggtctgcatttat

SEQ ID NO: 2793 - DNA, 18 bp, synthetic construct
  misc_feature 1..18: note = Synthetic
  source 1..18: mol_type = other DNA
ttaggtctgcatttatgc

SEQ ID NO: 2794 - DNA, 18 bp, synthetic construct
  misc_feature 1..18: note = Synthetic
  source 1..18: mol_type = other DNA
aggtctgcatttatgctt

SEQ ID NO: 2795 - DNA, 18 bp, synthetic construct
  misc_feature 1..18: note = Synthetic
  source 1..18: mol_type = other DNA
cacctgcagataaaaggg

SEQ ID NO: 2796 - DNA, 18 bp, synthetic construct
  misc_feature 1..18: note = Synthetic
  source 1..18: mol_type = other DNA
cctgcagataaaagggcc

SEQ ID NO: 2797 - DNA, 18 bp, synthetic construct
  misc_feature 1..18: note = Synthetic
  source 1..18: mol_type = other DNA
tgcagataaaagggccct

SEQ ID NO: 2798 - DNA, 18 bp, synthetic construct
  misc_feature 1..18: note = Synthetic
  source 1..18: mol_type = other DNA
cagataaaagggccctgc

SEQ ID NO: 2799 - DNA, 18 bp, synthetic construct
  misc_feature 1..18: note = Synthetic
  source 1..18: mol_type = other DNA
gataaaagggccctgcca

SEQ ID NO: 2800 - DNA, 18 bp, synthetic construct
  misc_feature 1..18: note = Synthetic
  source 1..18: mol_type = other DNA
taaaagggccctgccaat

SEQ ID NO: 2801 - DNA, 18 bp, synthetic construct
  misc_feature 1..18: note = Synthetic
  source 1..18: mol_type = other DNA
aaagggccctgccaatgc

SEQ ID NO: 2802 - DNA, 18 bp, synthetic construct
  misc_feature 1..18: note = Synthetic
  source 1..18: mol_type = other DNA
agggccctgccaatgcag

SEQ ID NO: 2803 - DNA, 18 bp, synthetic construct
  misc_feature 1..18: note = Synthetic
  source 1..18: mol_type = other DNA
ggccctgccaatgcaggt

SEQ ID NO: 2804 - DNA, 18 bp, synthetic construct
  misc_feature 1..18: note = Synthetic
  source 1..18: mol_type = other DNA
ccctgccaatgcaggttt

SEQ ID NO: 2805 - DNA, 18 bp, synthetic construct
  misc_feature 1..18: note = Synthetic
  source 1..18: mol_type = other DNA
ctgccaatgcaggtttct

SEQ ID NO: 2806 - DNA, 18 bp, synthetic construct
  misc_feature 1..18: note = Synthetic
  source 1..18: mol_type = other DNA
gccaatgcaggtttctct

SEQ ID NO: 2807 - DNA, 18 bp, synthetic construct
  misc_feature 1..18: note = Synthetic
  source 1..18: mol_type = other DNA
caatgcaggtttctctgt

SEQ ID NO: 2808 - DNA, 18 bp, synthetic construct
  misc_feature 1..18: note = Synthetic
  source 1..18: mol_type = other DNA
atgcaggtttctctgtgt

SEQ ID NO: 2809 - DNA, 18 bp, synthetic construct
  misc_feature 1..18: note = Synthetic
  source 1..18: mol_type = other DNA
gcaggtttctctgtgttc

SEQ ID NO: 2810 - DNA, 18 bp, synthetic construct
  misc_feature 1..18: note = Synthetic
  source 1..18: mol_type = other DNA
aggtttctctgtgttcca

SEQ ID NO: 2811 - DNA, 18 bp, synthetic construct
  misc_feature 1..18: note = Synthetic
  source 1..18: mol_type = other DNA
gtttctctgtgttccaca

SEQ ID NO: 2812 - DNA, 18 bp, synthetic construct
  misc_feature 1..18: note = Synthetic
  source 1..18: mol_type = other DNA
ttctctgtgttccacagg

SEQ ID NO: 2813 - DNA, 18 bp, synthetic construct
  misc_feature 1..18: note = Synthetic
  source 1..18: mol_type = other DNA
ctctgtgttccacaggcc

SEQ ID NO: 2814 - DNA, 18 bp, synthetic construct
  misc_feature 1..18: note = Synthetic
  source 1..18: mol_type = other DNA
ctgtgttccacaggccgt

SEQ ID NO: 2815 - DNA, 18 bp, synthetic construct
  misc_feature 1..18: note = Synthetic
  source 1..18: mol_type = other DNA
gtgttccacaggccgtgg

SEQ ID NO: 2816 - DNA, 18 bp, synthetic construct
  misc_feature 1..18: note = Synthetic
  source 1..18: mol_type = other DNA
gttccacaggccgtggca

SEQ ID NO: 2817 - DNA, 18 bp, synthetic construct
  misc_feature 1..18: note = Synthetic
  source 1..18: mol_type = other DNA
tccacaggccgtggcatg

SEQ ID NO: 2818 - DNA, 18 bp, synthetic construct
  misc_feature 1..18: note = Synthetic
  source 1..18: mol_type = other DNA
cacaggccgtggcatgcg

SEQ ID NO: 2819 - DNA, 18 bp, synthetic construct
  misc_feature 1..18: note = Synthetic
  source 1..18: mol_type = other DNA
caggccgtggcatgcggg

SEQ ID NO: 2820 - DNA, 18 bp, synthetic construct
  misc_feature 1..18: note = Synthetic
  source 1..18: mol_type = other DNA
ggccgtggcatgcgggga

SEQ ID NO: 2821 - DNA, 18 bp, synthetic construct
  misc_feature 1..18: note = Synthetic
  source 1..18: mol_type = other DNA
ccgtggcatgcggggatg

SEQ ID NO: 2822 - DNA, 18 bp, synthetic construct
  misc_feature 1..18: note = Synthetic
  source 1..18: mol_type = other DNA
gtggcatgcggggatggc

SEQ ID NO: 2823 - DNA, 18 bp, synthetic construct
  misc_feature 1..18: note = Synthetic
  source 1..18: mol_type = other DNA
ggcatgcggggatggcca

SEQ ID NO: 2824 - DNA, 18 bp, synthetic construct
  misc_feature 1..18: note = Synthetic
  source 1..18: mol_type = other DNA
catgcggggatggccatc

SEQ ID NO: 2825 - DNA, 18 bp, synthetic construct
  misc_feature 1..18: note = Synthetic
  source 1..18: mol_type = other DNA
tgcggggatggccatcac

SEQ ID NO: 2826 - DNA, 18 bp, synthetic construct
  misc_feature 1..18: note = Synthetic
  source 1..18: mol_type = other DNA
cggggatggccatcactg

SEQ ID NO: 2827 - DNA, 18 bp, synthetic construct
  misc_feature 1..18: note = Synthetic
  source 1..18: mol_type = other DNA
gggatggccatcactgct

SEQ ID NO: 2828 - DNA, 18 bp, synthetic construct
  misc_feature 1..18: note = Synthetic
  source 1..18: mol_type = other DNA
gatggccatcactgctgc

SEQ ID NO: 2829 - DNA, 18 bp, synthetic construct
  misc_feature 1..18: note = Synthetic
  source 1..18: mol_type = other DNA
tggccatcactgctgccc

SEQ ID NO: 2830 - DNA, 18 bp, synthetic construct
  misc_feature 1..18: note = Synthetic
  source 1..18: mol_type = other DNA
gccatcactgctgcccac

SEQ ID NO: 2831 - DNA, 18 bp, synthetic construct
  misc_feature 1..18: note = Synthetic
  source 1..18: mol_type = other DNA
catcactgctgcccacgg

SEQ ID NO: 2832 - DNA, 18 bp, synthetic construct
  misc_feature 1..18: note = Synthetic
  source 1..18: mol_type = other DNA
tcactgctgcccacgggg

SEQ ID NO: 2833 - DNA, 18 bp, synthetic construct
  misc_feature 1..18: note = Synthetic
  source 1..18: mol_type = other DNA
actgctgcccacggggct

SEQ ID NO: 2834 - DNA, 18 bp, synthetic construct
  misc_feature 1..18: note = Synthetic
  source 1..18: mol_type = other DNA
tgctgcccacggggcttc

SEQ ID NO: 2835 - DNA, 18 bp, synthetic construct
  misc_feature 1..18: note = Synthetic
  source 1..18: mol_type = other DNA
ctgcccacggggcttcca

SEQ ID NO: 2836 - DNA, 18 bp, synthetic construct
  misc_feature 1..18: note = Synthetic
  source 1..18: mol_type = other DNA
gcccacggggcttccact

SEQ ID NO: 2837 - DNA, 18 bp, synthetic construct
  misc_feature 1..18: note = Synthetic
  source 1..18: mol_type = other DNA
ccacggggcttccactgc

SEQ ID NO: 2838 - DNA, 18 bp, synthetic construct
  misc_feature 1..18: note = Synthetic
  source 1..18: mol_type = other DNA
acggggcttccactgcag

SEQ ID NO: 2839 - DNA, 18 bp, synthetic construct
  misc_feature 1..18: note = Synthetic
  source 1..18: mol_type = other DNA
ggggcttccactgcagtg

SEQ ID NO: 2840 - DNA, 18 bp, synthetic construct
  misc_feature 1..18: note = Synthetic
  source 1..18: mol_type = other DNA
ggcttccactgcagtgca

SEQ ID NO: 2841 - DNA, 18 bp, synthetic construct
  misc_feature 1..18: note = Synthetic
  source 1..18: mol_type = other DNA
cttccactgcagtgcaga

SEQ ID NO: 2842 - DNA, 18 bp, synthetic construct
  misc_feature 1..18: note = Synthetic
  source 1..18: mol_type = other DNA
tccactgcagtgcagacg

SEQ ID NO: 2843 - DNA, 18 bp, synthetic construct
  misc_feature 1..18: note = Synthetic
  source 1..18: mol_type = other DNA
cactgcagtgcagacggg

SEQ ID NO: 2844 - DNA, 18 bp, synthetic construct
  misc_feature 1..18: note = Synthetic
  source 1..18: mol_type = other DNA
ctgcagtgcagacgggcg

SEQ ID NO: 2845 - DNA, 18 bp, synthetic construct
  misc_feature 1..18: note = Synthetic
  source 1..18: mol_type = other DNA
gcagtgcagacgggcgat

SEQ ID NO: 2846 - DNA, 18 bp, synthetic construct
  misc_feature 1..18: note = Synthetic
  source 1..18: mol_type = other DNA
agtgcagacgggcgatcc

SEQ ID NO: 2847 - DNA, 18 bp, synthetic construct
  misc_feature 1..18: note = Synthetic
  source 1..18: mol_type = other DNA
tgcagacgggcgatcctg

SEQ ID NO: 2848 - DNA, 18 bp, synthetic construct
  misc_feature 1..18: note = Synthetic
  source 1..18: mol_type = other DNA
cagacgggcgatcctgct

SEQ ID NO: 2849 - DNA, 18 bp, synthetic construct
  misc_feature 1..18: note = Synthetic
  source 1..18: mol_type = other DNA
gacgggcgatcctgcttc

SEQ ID NO: 2850 - DNA, 18 bp, synthetic construct
  misc_feature 1..18: note = Synthetic
  source 1..18: mol_type = other DNA
cgggcgatcctgcttcca

SEQ ID NO: 2851 - DNA, 18 bp, synthetic construct
  misc_feature 1..18: note = Synthetic
  source 1..18: mol_type = other DNA
ggcgatcctgcttccaaa

SEQ ID NO: 2852 - DNA, 18 bp, synthetic construct
  misc_feature 1..18: note = Synthetic
  source 1..18: mol_type = other DNA
cgatcctgcttccaaaga

SEQ ID NO: 2853 - DNA, 18 bp, synthetic construct
  misc_feature 1..18: note = Synthetic
  source 1..18: mol_type = other DNA
atcctgcttccaaagatc

SEQ ID NO: 2854 - DNA, 18 bp, synthetic construct
  misc_feature 1..18: note = Synthetic
  source 1..18: mol_type = other DNA
cctgcttccaaagatcag

SEQ ID NO: 2855 - DNA, 18 bp, synthetic construct
  misc_feature 1..18: note = Synthetic
  source 1..18: mol_type = other DNA
tgcagctggggtgtgggt

SEQ ID NO: 2856 - DNA, 18 bp, synthetic construct
  misc_feature 1..18: note = Synthetic
  source 1..18: mol_type = other DNA
cagctggggtgtgggtgc

SEQ ID NO: 2857 - DNA, 18 bp, synthetic construct
  misc_feature 1..18: note = Synthetic
  source 1..18: mol_type = other DNA
gctggggtgtgggtgcag

SEQ ID NO: 2858 - DNA, 18 bp, synthetic construct
  misc_feature 1..18: note = Synthetic
  source 1..18: mol_type = other DNA
tggggtgtgggtgcaggg

SEQ ID NO: 2859 - DNA, 18 bp, synthetic construct
  misc_feature 1..18: note = Synthetic
  source 1..18: mol_type = other DNA
gggtgtgggtgcagggca

SEQ ID NO: 2860 - DNA, 18 bp, synthetic construct
  misc_feature 1..18: note = Synthetic
  source 1..18: mol_type = other DNA
gtgtgggtgcagggcagg

SEQ ID NO: 2861 - DNA, 18 bp, synthetic construct
  misc_feature 1..18: note = Synthetic
  source 1..18: mol_type = other DNA
gtgggtgcagggcaggca

SEQ ID NO: 2862 - DNA, 18 bp, synthetic construct
  misc_feature 1..18: note = Synthetic
  source 1..18: mol_type = other DNA
gggtgcagggcaggcaga

SEQ ID NO: 2863 - DNA, 18 bp, synthetic construct
  misc_feature 1..18: note = Synthetic
  source 1..18: mol_type = other DNA
gtgcagggcaggcagacg

SEQ ID NO: 2864 - DNA, 18 bp, synthetic construct
  misc_feature 1..18: note = Synthetic
  source 1..18: mol_type = other DNA
gcagggcaggcagacggg

SEQ ID NO: 2865 - DNA, 18 bp, synthetic construct
  misc_feature 1..18: note = Synthetic
  source 1..18: mol_type = other DNA
agggcaggcagacgggca

SEQ ID NO: 2866 - DNA, 18 bp, synthetic construct
  misc_feature 1..18: note = Synthetic
  source 1..18: mol_type = other DNA
ggcaggcagacgggcagc

SEQ ID NO: 2867 - DNA, 18 bp, synthetic construct
  misc_feature 1..18: note = Synthetic
  source 1..18: mol_type = other DNA
caggcagacgggcagcat

SEQ ID NO: 2868 - DNA, 18 bp, synthetic construct
  misc_feature 1..18: note = Synthetic
  source 1..18: mol_type = other DNA
cagacgggcagcatgtgg

SEQ ID NO: 2869 - DNA, 18 bp, synthetic construct
  misc_feature 1..18: note = Synthetic
  source 1..18: mol_type = other DNA
gacgggcagcatgtggag

SEQ ID NO: 2870 - DNA, 18 bp, synthetic construct
  misc_feature 1..18: note = Synthetic
  source 1..18: mol_type = other DNA
cgggcagcatgtggagtc

SEQ ID NO: 2871 - DNA, 18 bp, synthetic construct
  misc_feature 1..18: note = Synthetic
  source 1..18: mol_type = other DNA
gtcaccttccctgagtgg

SEQ ID NO: 2872 - DNA, 18 bp, synthetic construct
  misc_feature 1..18: note = Synthetic
  source 1..18: mol_type = other DNA
caccttccctgagtgggc

SEQ ID NO: 2873 - DNA, 18 bp, synthetic construct
  misc_feature 1..18: note = Synthetic
  source 1..18: mol_type = other DNA
ccttccctgagtgggctg

SEQ ID NO: 2874 - DNA, 18 bp, synthetic construct
  misc_feature 1..18: note = Synthetic
  source 1..18: mol_type = other DNA
ttccctgagtgggctggt

SEQ ID NO: 2875 - DNA, 18 bp, synthetic construct
  misc_feature 1..18: note = Synthetic
  source 1..18: mol_type = other DNA
ccctgagtgggctggtag

SEQ ID NO: 2876 - DNA, 18 bp, synthetic construct
  misc_feature 1..18: note = Synthetic
  source 1..18: mol_type = other DNA
ctgagtgggctggtagta

SEQ ID NO: 2877 - DNA, 18 bp, synthetic construct
  misc_feature 1..18: note = Synthetic
  source 1..18: mol_type = other DNA
gagtgggctggtagtatc

SEQ ID NO: 2878 - DNA, 18 bp, synthetic construct
  misc_feature 1..18: note = Synthetic
  source 1..18: mol_type = other DNA
gtgggctggtagtatcct

SEQ ID NO: 2879 - DNA, 18 bp, synthetic construct
  misc_feature 1..18: note = Synthetic
  source 1..18: mol_type = other DNA
gggctggtagtatcctgg

SEQ ID NO: 2880 - DNA, 18 bp, synthetic construct
  misc_feature 1..18: note = Synthetic
  source 1..18: mol_type = other DNA
gctggtagtatcctgggt

SEQ ID NO: 2881 - DNA, 18 bp, synthetic construct
  misc_feature 1..18: note = Synthetic
  source 1..18: mol_type = other DNA
tggtagtatcctgggtca

SEQ ID NO: 2882 - DNA, 18 bp, synthetic construct
  misc_feature 1..18: note = Synthetic
  source 1..18: mol_type = other DNA
gtagtatcctgggtcatc

SEQ ID NO: 2883 - DNA, 18 bp, synthetic construct
  misc_feature 1..18: note = Synthetic
  source 1..18: mol_type = other DNA
agtatcctgggtcatctt

SEQ ID NO: 2884 - DNA, 18 bp, synthetic construct
  misc_feature 1..18: note = Synthetic
  source 1..18: mol_type = other DNA
tatcctgggtcatcttgt

SEQ ID NO: 2885 - DNA, 18 bp, synthetic construct
  misc_feature 1..18: note = Synthetic
  source 1..18: mol_type = other DNA
tcctgggtcatcttgtcc

SEQ ID NO: 2886 - DNA, 18 bp, synthetic construct
  misc_feature 1..18: note = Synthetic
  source 1..18: mol_type = other DNA
ctgggtcatcttgtccac

SEQ ID NO: 2887 - DNA, 18 bp, synthetic construct
  misc_feature 1..18: note = Synthetic
  source 1..18: mol_type = other DNA
gggtcatcttgtccacag

SEQ ID NO: 2888 - DNA, 18 bp, synthetic construct
  misc_feature 1..18: note = Synthetic
  source 1..18: mol_type = other DNA
gtcatcttgtccacaggt

SEQ ID NO: 2889 - DNA, 18 bp, synthetic construct
  misc_feature 1..18: note = Synthetic
  source 1..18: mol_type = other DNA
catcttgtccacaggtaa

SEQ ID NO: 2890 - DNA, 18 bp, synthetic construct
  misc_feature 1..18: note = Synthetic
  source 1..18: mol_type = other DNA
tcttgtccacaggtaaca

SEQ ID NO: 2891 - DNA, 18 bp, synthetic construct
  misc_feature 1..18: note = Synthetic
  source 1..18: mol_type = other DNA
ttgtccacaggtaacaac

SEQ ID NO: 2892 - DNA, 18 bp, synthetic construct
  misc_feature 1..18: note = Synthetic
  source 1..18: mol_type = other DNA
gtccacaggtaacaactc

SEQ ID NO: 2893 - DNA, 18 bp, synthetic construct
  misc_feature 1..18: note = Synthetic
  source 1..18: mol_type = other DNA
ccacaggtaacaactccg

SEQ ID NO: 2894 - DNA, 18 bp, synthetic construct
  misc_feature 1..18: note = Synthetic
  source 1..18: mol_type = other DNA
acaggtaacaactccgtg

SEQ ID NO: 2895 - DNA, 18 bp, synthetic construct
  misc_feature 1..18: note = Synthetic
  source 1..18: mol_type = other DNA
aggtaacaactccgtggg

SEQ ID NO: 2896 - DNA, 18 bp, synthetic construct
  misc_feature 1..18: note = Synthetic
  source 1..18: mol_type = other DNA
gtaacaactccgtgggtg

SEQ ID NO: 2897 - DNA, 18 bp, synthetic construct
  misc_feature 1..18: note = Synthetic
  source 1..18: mol_type = other DNA
aacaactccgtgggtgcc

SEQ ID NO: 2898 - DNA, 18 bp, synthetic construct
  misc_feature 1..18: note = Synthetic
  source 1..18: mol_type = other DNA
caactccgtgggtgccat

SEQ ID NO: 2899 - DNA, 18 bp, synthetic construct
  misc_feature 1..18: note = Synthetic
  source 1..18: mol_type = other DNA
actccgtgggtgccatcc

SEQ ID NO: 2900 - DNA, 18 bp, synthetic construct
  misc_feature 1..18: note = Synthetic
  source 1..18: mol_type = other DNA
tccgtgggtgccatccag

SEQ ID NO: 2901 - DNA, 18 bp, synthetic construct
  misc_feature 1..18: note = Synthetic
  source 1..18: mol_type = other DNA
cgtgggtgccatccagtg

SEQ ID NO: 2902 - DNA, 18 bp, synthetic construct
  misc_feature 1..18: note = Synthetic
  source 1..18: mol_type = other DNA
tgggtgccatccagtgcc

SEQ ID NO: 2903 - DNA, 18 bp, synthetic construct
  misc_feature 1..18: note = Synthetic
  source 1..18: mol_type = other DNA
ggtgccatccagtgccct

SEQ ID NO: 2904 - DNA, 18 bp, synthetic construct
  misc_feature 1..18: note = Synthetic
  source 1..18: mol_type = other DNA
tgccatccagtgccctga

SEQ ID NO: 2905 - DNA, 18 bp, synthetic construct
  misc_feature 1..18: note = Synthetic
  source 1..18: mol_type = other DNA
ccatccagtgccctgata

SEQ ID NO: 2906 - DNA, 18 bp, synthetic construct
  misc_feature 1..18: note = Synthetic
  source 1..18: mol_type = other DNA
atccagtgccctgatagt

SEQ ID NO: 2907 - DNA, 18 bp, synthetic construct
  misc_feature 1..18: note = Synthetic
  source 1..18: mol_type = other DNA
ccagtgccctgatagtca

SEQ ID NO: 2908 - DNA, 18 bp, synthetic construct
  misc_feature 1..18: note = Synthetic
  source 1..18: mol_type = other DNA
agtgccctgatagtcagt

SEQ ID NO: 2909 - DNA, 18 bp, synthetic construct
  misc_feature 1..18: note = Synthetic
  source 1..18: mol_type = other DNA
tgccctgatagtcagttc

SEQ ID NO: 2910 - DNA, 18 bp, synthetic construct
  misc_feature 1..18: note = Synthetic
  source 1..18: mol_type = other DNA
ccctgatagtcagttcga

SEQ ID NO: 2911 - DNA, 18 bp, synthetic construct
  misc_feature 1..18: note = Synthetic
  source 1..18: mol_type = other DNA
ctgatagtcagttcgaat

SEQ ID NO: 2912 - DNA, 18 bp, synthetic construct
  misc_feature 1..18: note = Synthetic
  source 1..18: mol_type = other DNA
gatagtcagttcgaatgc

SEQ ID NO: 2913 - DNA, 18 bp, synthetic construct
  misc_feature 1..18: note = Synthetic
  source 1..18: mol_type = other DNA
tagtcagttcgaatgccc

SEQ ID NO: 2914 - DNA, 18 bp, synthetic construct
  misc_feature 1..18: note = Synthetic
  source 1..18: mol_type = other DNA
gtcagttcgaatgcccgg

SEQ ID NO: 2915 - DNA, 18 bp, synthetic construct
  misc_feature 1..18: note = Synthetic
  source 1..18: mol_type = other DNA
cagttcgaatgcccggac

SEQ ID NO: 2916 - DNA, 18 bp, synthetic construct
  misc_feature 1..18: note = Synthetic
  source 1..18: mol_type = other DNA
gttcgaatgcccggactt

SEQ ID NO: 2917 - DNA, 18 bp, synthetic construct
  misc_feature 1..18: note = Synthetic
  source 1..18: mol_type = other DNA
tcgaatgcccggacttct

SEQ ID NO: 2918 - DNA, 18 bp, synthetic construct
  misc_feature 1..18: note = Synthetic
  source 1..18: mol_type = other DNA
gaatgcccggacttctcc

SEQ ID NO: 2919 - DNA, 18 bp, synthetic construct
  misc_feature 1..18: note = Synthetic
  source 1..18: mol_type = other DNA
atgcccggacttctccac

SEQ ID NO: 2920 - DNA, 18 bp, synthetic construct
  misc_feature 1..18: note = Synthetic
  source 1..18: mol_type = other DNA
gcccggacttctccacgt

SEQ ID NO: 2921 - DNA, 18 bp, synthetic construct
  misc_feature 1..18: note = Synthetic
  source 1..18: mol_type = other DNA
ccggacttctccacgtgc

SEQ ID NO: 2922 - DNA, 18 bp, synthetic construct
  misc_feature 1..18: note = Synthetic
  source 1..18: mol_type = other DNA
ggacttctccacgtgctg

SEQ ID NO: 2923 - DNA, 18 bp, synthetic construct
  misc_feature 1..18: note = Synthetic
  source 1..18: mol_type = other DNA
acttctccacgtgctgtg

SEQ ID NO: 2924 - DNA, 18 bp, synthetic construct
  misc_feature 1..18: note = Synthetic
  source 1..18: mol_type = other DNA
ttctccacgtgctgtgtt

SEQ ID NO: 2925 - DNA, 18 bp, synthetic construct
  misc_feature 1..18: note = Synthetic
  source 1..18: mol_type = other DNA
ctccacgtgctgtgttat

SEQ ID NO: 2926 - DNA, 18 bp, synthetic construct
  misc_feature 1..18: note = Synthetic
  source 1..18: mol_type = other DNA
ccacgtgctgtgttatgg

SEQ ID NO: 2927 - DNA, 18 bp, synthetic construct
  misc_feature 1..18: note = Synthetic
  source 1..18: mol_type = other DNA
acgtgctgtgttatggtc

SEQ ID NO: 2928 - DNA, 18 bp, synthetic construct
  misc_feature 1..18: note = Synthetic
  source 1..18: mol_type = other DNA
gtgctgtgttatggtcga

SEQ ID NO: 2929 - DNA, 18 bp, synthetic construct
  misc_feature 1..18: note = Synthetic
  source 1..18: mol_type = other DNA
gctgtgttatggtcgatg

SEQ ID NO: 2930 - DNA, 18 bp, synthetic construct
  misc_feature 1..18: note = Synthetic
  source 1..18: mol_type = other DNA
tgtgttatggtcgatggc

SEQ ID NO: 2931 - DNA, 18 bp, synthetic construct
  misc_feature 1..18: note = Synthetic
  source 1..18: mol_type = other DNA
tgttatggtcgatggctc

SEQ ID NO: 2932 - DNA, 18 bp, synthetic construct
  misc_feature 1..18: note = Synthetic
  source 1..18: mol_type = other DNA
ttatggtcgatggctcct

SEQ ID NO: 2933 - DNA, 18 bp, synthetic construct
  misc_feature 1..18: note = Synthetic
  source 1..18: mol_type = other DNA
atggtcgatggctcctgg

SEQ ID NO: 2934 - DNA, 18 bp, synthetic construct
  misc_feature 1..18: note = Synthetic
  source 1..18: mol_type = other DNA
ggtcgatggctcctgggg

SEQ ID NO: 2935 - DNA, 18 bp, synthetic construct
  misc_feature 1..18: note = Synthetic
  source 1..18: mol_type = other DNA
tcgatggctcctgggggt

SEQ ID NO: 2936 - DNA, 18 bp, synthetic construct
  misc_feature 1..18: note = Synthetic
  source 1..18: mol_type = other DNA
gatggctcctgggggtgc

SEQ ID NO: 2937 - DNA, 18 bp, synthetic construct
  misc_feature 1..18: note = Synthetic
  source 1..18: mol_type = other DNA
tggctcctgggggtgctg

SEQ ID NO: 2938 - DNA, 18 bp, synthetic construct
  misc_feature 1..18: note = Synthetic
  source 1..18: mol_type = other DNA
gctcctgggggtgctgcc

SEQ ID NO: 2939 - DNA, 18 bp, synthetic construct
  misc_feature 1..18: note = Synthetic
  source 1..18: mol_type = other DNA
tcctgggggtgctgcccc

SEQ ID NO: 2940 - DNA, 18 bp, synthetic construct
  misc_feature 1..18: note = Synthetic
  source 1..18: mol_type = other DNA
ctgggggtgctgccccat

SEQ ID NO: 2941 - DNA, 18 bp, synthetic construct
  misc_feature 1..18: note = Synthetic
  source 1..18: mol_type = other DNA
gggggtgctgccccatgc

SEQ ID NO: 2942 - DNA, 18 bp, synthetic construct
  misc_feature 1..18: note = Synthetic
  source 1..18: mol_type = other DNA
gggtgctgccccatgccc

SEQ ID NO: 2943 - DNA, 18 bp, synthetic construct
  misc_feature 1..18: note = Synthetic
  source 1..18: mol_type = other DNA
gtgctgccccatgcccca

SEQ ID NO: 2944 - DNA, 18 bp, synthetic construct
  misc_feature 1..18: note = Synthetic
  source 1..18: mol_type = other DNA
gtacaaatctgggggaga

SEQ ID NO: 2945 - DNA, 18 bp, synthetic construct
  misc_feature 1..18: note = Synthetic
  source 1..18: mol_type = other DNA
acaaatctgggggagatg

SEQ ID NO: 2946 - DNA, 18 bp, synthetic construct
  misc_feature 1..18: note = Synthetic
  source 1..18: mol_type = other DNA
aaatctgggggagatggg

SEQ ID NO: 2947 - DNA, 18 bp, synthetic construct
  misc_feature 1..18: note = Synthetic
  source 1..18: mol_type = other DNA
atctgggggagatggggg

SEQ ID NO: 2948 - DNA, 18 bp, synthetic construct
  misc_feature 1..18: note = Synthetic
  source 1..18: mol_type = other DNA
ctgggggagatgggggta

SEQ ID NO: 2949 - DNA, 18 bp, synthetic construct
  misc_feature 1..18: note = Synthetic
  source 1..18: mol_type = other DNA
gggggagatgggggtatg

SEQ ID NO: 2950 - DNA, 18 bp, synthetic construct
  misc_feature 1..18: note = Synthetic
  source 1..18: mol_type = other DNA
gggagatgggggtatgtg

SEQ ID NO: 2951 - DNA, 18 bp, synthetic construct
  misc_feature 1..18: note = Synthetic
  source 1..18: mol_type = other DNA
gagatgggggtatgtgga

SEQ ID NO: 2952 - DNA, 18 bp, synthetic construct
  misc_feature 1..18: note = Synthetic
  source 1..18: mol_type = other DNA
gatgggggtatgtggagg

SEQ ID NO: 2953 - DNA, 18 bp, synthetic construct
  misc_feature 1..18: note = Synthetic
  source 1..18: mol_type = other DNA
tgggggtatgtggaggga

SEQ ID NO: 2954 - DNA, 18 bp, synthetic construct
  misc_feature 1..18: note = Synthetic
  source 1..18: mol_type = other DNA
ggggtatgtggagggaag

SEQ ID NO: 2955 - DNA, 18 bp, synthetic construct
  misc_feature 1..18: note = Synthetic
  source 1..18: mol_type = other DNA
ggtatgtggagggaagtg

SEQ ID NO: 2956 - DNA, 18 bp, synthetic construct
  misc_feature 1..18: note = Synthetic
  source 1..18: mol_type = other DNA
tatgtggagggaagtggg

SEQ ID NO: 2957 - DNA, 18 bp, synthetic construct
  misc_feature 1..18: note = Synthetic
  source 1..18: mol_type = other DNA
tgtggagggaagtggggg

SEQ ID NO: 2958 - DNA, 18 bp, synthetic construct
  misc_feature 1..18: note = Synthetic
  source 1..18: mol_type = other DNA
tggagggaagtgggggca

SEQ ID NO: 2959 - DNA, 18 bp, synthetic construct
  misc_feature 1..18: note = Synthetic
  source 1..18: mol_type = other DNA
gagggaagtgggggcaga

SEQ ID NO: 2960 - DNA, 18 bp, synthetic construct
  misc_feature 1..18: note = Synthetic
  source 1..18: mol_type = other DNA
gggaagtgggggcagagt

SEQ ID NO: 2961 - DNA, 18 bp, synthetic construct
  misc_feature 1..18: note = Synthetic
  source 1..18: mol_type = other DNA
tgggggccaggggcaggg

SEQ ID NO: 2962 - DNA, 18 bp, synthetic construct
  misc_feature 1..18: note = Synthetic
  source 1..18: mol_type = other DNA
ggggccaggggcaggggg

SEQ ID NO: 2963 - DNA, 18 bp, synthetic construct
  misc_feature 1..18: note = Synthetic
  source 1..18: mol_type = other DNA
ggccaggggcagggggtg

SEQ ID NO: 2964 - DNA, 18 bp, synthetic construct
  misc_feature 1..18: note = Synthetic
  source 1..18: mol_type = other DNA
ccaggggcagggggtgaa

SEQ ID NO: 2965 - DNA, 18 bp, synthetic construct
  misc_feature 1..18: note = Synthetic
  source 1..18: mol_type = other DNA
aggggcagggggtgaaga

SEQ ID NO: 2966 - DNA, 18 bp, synthetic construct
  misc_feature 1..18: note = Synthetic
  source 1..18: mol_type = other DNA
gggcagggggtgaagacg

SEQ ID NO: 2967 - DNA, 18 bp, synthetic construct
  misc_feature 1..18: note = Synthetic
  source 1..18: mol_type = other DNA
gcagggggtgaagacgga

SEQ ID NO: 2968 - DNA, 18 bp, synthetic construct
  misc_feature 1..18: note = Synthetic
  source 1..18: mol_type = other DNA
agggggtgaagacggagt

SEQ ID NO: 2969 - DNA, 18 bp, synthetic construct
  misc_feature 1..18: note = Synthetic
  source 1..18: mol_type = other DNA
ggggtgaagacggagtca

SEQ ID NO: 2970 - DNA, 18 bp, synthetic construct
  misc_feature 1..18: note = Synthetic
  source 1..18: mol_type = other DNA
ggtgaagacggagtcagg

SEQ ID NO: 2971 - DNA, 18 bp, synthetic construct
  misc_feature 1..18: note = Synthetic
  source 1..18: mol_type = other DNA
tgaagacggagtcaggac

SEQ ID NO: 2972 - DNA, 18 bp, synthetic construct
  misc_feature 1..18: note = Synthetic
  source 1..18: mol_type = other DNA
aagacggagtcaggacca

SEQ ID NO: 2973 - DNA, 18 bp, synthetic construct
  misc_feature 1..18: note = Synthetic
  source 1..18: mol_type = other DNA
gacggagtcaggaccatt

SEQ ID NO: 2974 - DNA, 18 bp, synthetic construct
  misc_feature 1..18: note = Synthetic
  source 1..18: mol_type = other DNA
cggagtcaggaccatttt

SEQ ID NO: 2975 - DNA, 18 bp, synthetic construct
  misc_feature 1..18: note = Synthetic
  source 1..18: mol_type = other DNA
gagtcaggaccatttttt

SEQ ID NO: 2976 - DNA, 18 bp, synthetic construct
  misc_feature 1..18: note = Synthetic
  source 1..18: mol_type = other DNA
gtcaggaccattttttct

SEQ ID NO: 2977 - DNA, 18 bp, synthetic construct
  misc_feature 1..18: note = Synthetic
  source 1..18: mol_type = other DNA
caggaccattttttctca

SEQ ID NO: 2978 - DNA, 18 bp, synthetic construct
  misc_feature 1..18: note = Synthetic
  source 1..18: mol_type = other DNA
gcttcctgctgtgaagac

SEQ ID NO: 2979 - DNA, 18 bp, synthetic construct
  misc_feature 1..18: note = Synthetic
  source 1..18: mol_type = other DNA
ttcctgctgtgaagacag

SEQ ID NO: 2980 - DNA, 18 bp, synthetic construct
  misc_feature 1..18: note = Synthetic
  source 1..18: mol_type = other DNA
cctgctgtgaagacaggg

SEQ ID NO: 2981 - DNA, 18 bp, synthetic construct
  misc_feature 1..18: note = Synthetic
  source 1..18: mol_type = other DNA
tgctgtgaagacagggtg

SEQ ID NO: 2982 - DNA, 18 bp, synthetic construct
  misc_feature 1..18: note = Synthetic
  source 1..18: mol_type = other DNA
ctgtgaagacagggtgca

SEQ ID NO: 2983 - DNA, 18 bp, synthetic construct
  misc_feature 1..18: note = Synthetic
  source 1..18: mol_type = other DNA
gtgaagacagggtgcact

SEQ ID NO: 2984 - DNA, 18 bp, synthetic construct
  misc_feature 1..18: note = Synthetic
  source 1..18: mol_type = other DNA
gaagacagggtgcactgc

SEQ ID NO: 2985 - DNA, 18 bp, synthetic construct
  misc_feature 1..18: note = Synthetic
  source 1..18: mol_type = other DNA
agacagggtgcactgctg

SEQ ID NO: 2986 - DNA, 18 bp, synthetic construct
  misc_feature 1..18: note = Synthetic
  source 1..18: mol_type = other DNA
acagggtgcactgctgtc

SEQ ID NO: 2987 - DNA, 18 bp, synthetic construct
  misc_feature 1..18: note = Synthetic
  source 1..18: mol_type = other DNA
agggtgcactgctgtccg

SEQ ID NO: 2988 - DNA, 18 bp, synthetic construct
  misc_feature 1..18: note = Synthetic
  source 1..18: mol_type = other DNA
ggtgcactgctgtccgca

SEQ ID NO: 2989 - DNA, 18 bp, synthetic construct
  misc_feature 1..18: note = Synthetic
  source 1..18: mol_type = other DNA
tgcactgctgtccgcacg

SEQ ID NO: 2990 - DNA, 18 bp, synthetic construct
  misc_feature 1..18: note = Synthetic
  source 1..18: mol_type = other DNA
cactgctgtccgcacggt

SEQ ID NO: 2991 - DNA, 18 bp, synthetic construct
  misc_feature 1..18: note = Synthetic
  source 1..18: mol_type = other DNA
ctgctgtccgcacggtgc

SEQ ID NO: 2992 - DNA, 18 bp, synthetic construct
  misc_feature 1..18: note = Synthetic
  source 1..18: mol_type = other DNA
gctgtccgcacggtgcct

SEQ ID NO: 2993 - DNA, 18 bp, synthetic construct
  misc_feature 1..18: note = Synthetic
  source 1..18: mol_type = other DNA
tgtccgcacggtgccttc

SEQ ID NO: 2994 - DNA, 18 bp, synthetic construct
  misc_feature 1..18: note = Synthetic
  source 1..18: mol_type = other DNA
tccgcacggtgccttctg

SEQ ID NO: 2995 - DNA, 18 bp, synthetic construct
  misc_feature 1..18: note = Synthetic
  source 1..18: mol_type = other DNA
cgcacggtgccttctgcg

SEQ ID NO: 2996 - DNA, 18 bp, synthetic construct
  misc_feature 1..18: note = Synthetic
  source 1..18: mol_type = other DNA
cacggtgccttctgcgac

SEQ ID NO: 2997 - DNA, 18 bp, synthetic construct
  misc_feature 1..18: note = Synthetic
  source 1..18: mol_type = other DNA
cggtgccttctgcgacct

SEQ ID NO: 2998 - DNA, 18 bp, synthetic construct
  misc_feature 1..18: note = Synthetic
  source 1..18: mol_type = other DNA
gtgccttctgcgacctgg

SEQ ID NO: 2999 - DNA, 18 bp, synthetic construct
  misc_feature 1..18: note = Synthetic
  source 1..18: mol_type = other DNA
gccttctgcgacctggtt

SEQ ID NO: 3000 - DNA, 18 bp, synthetic construct
  misc_feature 1..18: note = Synthetic
  source 1..18: mol_type = other DNA
cttctgcgacctggttca

SEQ ID NO: 3001 - DNA, 18 bp, synthetic construct
  misc_feature 1..18: note = Synthetic
  source 1..18: mol_type = other DNA
tctgcgacctggttcaca

SEQ ID NO: 3002 - DNA, 18 bp, synthetic construct
  misc_feature 1..18: note = Synthetic
  source 1..18: mol_type = other DNA
tgcgacctggttcacacc

SEQ ID NO: 3003 - DNA, 18 bp, synthetic construct
  misc_feature 1..18: note = Synthetic
  source 1..18: mol_type = other DNA
cgacctggttcacacccg

SEQ ID NO: 3004 - DNA, 18 bp, synthetic construct
  misc_feature 1..18: note = Synthetic
  source 1..18: mol_type = other DNA
acctggttcacacccgct

SEQ ID NO: 3005 - DNA, 18 bp, synthetic construct
  misc_feature 1..18: note = Synthetic
  source 1..18: mol_type = other DNA
ctggttcacacccgctgc

SEQ ID NO: 3006 - DNA, 18 bp, synthetic construct
  misc_feature 1..18: note = Synthetic
  source 1..18: mol_type = other DNA
ggttcacacccgctgcat

SEQ ID NO: 3007 - DNA, 18 bp, synthetic construct
  misc_feature 1..18: note = Synthetic
  source 1..18: mol_type = other DNA
ttcacacccgctgcatca

SEQ ID NO: 3008 - DNA, 18 bp, synthetic construct
  misc_feature 1..18: note = Synthetic
  source 1..18: mol_type = other DNA
cacacccgctgcatcaca

SEQ ID NO: 3009 - DNA, 18 bp, synthetic construct
  misc_feature 1..18: note = Synthetic
  source 1..18: mol_type = other DNA
cacccgctgcatcacacc

SEQ ID NO: 3010 - DNA, 18 bp, synthetic construct
  misc_feature 1..18: note = Synthetic
  source 1..18: mol_type = other DNA
cccgctgcatcacaccca

SEQ ID NO: 3011 - DNA, 18 bp, synthetic construct
  misc_feature 1..18: note = Synthetic
  source 1..18: mol_type = other DNA
cgctgcatcacacccacg

SEQ ID NO: 3012 - DNA, 18 bp, synthetic construct
  misc_feature 1..18: note = Synthetic
  source 1..18: mol_type = other DNA
ctgcatcacacccacggg

SEQ ID NO: 3013 - DNA, 18 bp, synthetic construct
  misc_feature 1..18: note = Synthetic
  source 1..18: mol_type = other DNA
gcatcacacccacgggca

SEQ ID NO: 3014 - DNA, 18 bp, synthetic construct
  misc_feature 1..18: note = Synthetic
  source 1..18: mol_type = other DNA
atcacacccacgggcacc

SEQ ID NO: 3015 - DNA, 18 bp, synthetic construct
  misc_feature 1..18: note = Synthetic
  source 1..18: mol_type = other DNA
cacacccacgggcaccca

SEQ ID NO: 3016 - DNA, 18 bp, synthetic construct
  misc_feature 1..18: note = Synthetic
  source 1..18: mol_type = other DNA
cacccacgggcacccacc

SEQ ID NO: 3017 - DNA, 18 bp, synthetic construct
  misc_feature 1..18: note = Synthetic
  source 1..18: mol_type = other DNA
cccacgggcacccacccc

SEQ ID NO: 3018 - DNA, 18 bp, synthetic construct
  misc_feature 1..18: note = Synthetic
  source 1..18: mol_type = other DNA
cacgggcacccaccccct

SEQ ID NO: 3019 - DNA, 18 bp, synthetic construct
  misc_feature 1..18: note = Synthetic
  source 1..18: mol_type = other DNA
cgggcacccaccccctgg

SEQ ID NO: 3020 - DNA, 18 bp, synthetic construct
  misc_feature 1..18: note = Synthetic
  source 1..18: mol_type = other DNA
ggcacccaccccctggca

SEQ ID NO: 3021 - DNA, 18 bp, synthetic construct
  misc_feature 1..18: note = Synthetic
  source 1..18: mol_type = other DNA
cacccaccccctggcaaa

SEQ ID NO: 3022 - DNA, 18 bp, synthetic construct
  misc_feature 1..18: note = Synthetic
  source 1..18: mol_type = other DNA
cccaccccctggcaaaga

SEQ ID NO: 3023 - DNA, 18 bp, synthetic construct
  misc_feature 1..18: note = Synthetic
  source 1..18: mol_type = other DNA
caccccctggcaaagaag

SEQ ID NO: 3024 - DNA, 18 bp, synthetic construct
  misc_feature 1..18: note = Synthetic
  source 1..18: mol_type = other DNA
ccccctggcaaagaagct

SEQ ID NO: 3025 - DNA, 18 bp, synthetic construct
  misc_feature 1..18: note = Synthetic
  source 1..18: mol_type = other DNA
ccctggcaaagaagctcc

SEQ ID NO: 3026 - DNA, 18 bp, synthetic construct
  misc_feature 1..18: note = Synthetic
  source 1..18: mol_type = other DNA
ctggcaaagaagctccct

SEQ ID NO: 3027 - DNA, 18 bp, synthetic construct
  misc_feature 1..18: note = Synthetic
  source 1..18: mol_type = other DNA
ggcaaagaagctccctgc

SEQ ID NO: 3028 - DNA, 18 bp, synthetic construct
  misc_feature 1..18: note = Synthetic
  source 1..18: mol_type = other DNA
caaagaagctccctgccc

SEQ ID NO: 3029 - DNA, 18 bp, synthetic construct
  misc_feature 1..18: note = Synthetic
  source 1..18: mol_type = other DNA
aagaagctccctgcccag

SEQ ID NO: 3030 - DNA, 18 bp, synthetic construct
  misc_feature 1..18: note = Synthetic
  source 1..18: mol_type = other DNA
gaagctccctgcccagag

SEQ ID NO: 3031 - DNA, 18 bp, synthetic construct
  misc_feature 1..18: note = Synthetic
  source 1..18: mol_type = other DNA
agctccctgcccagagga

SEQ ID NO: 3032 - DNA, 18 bp, synthetic construct
  misc_feature 1..18: note = Synthetic
  source 1..18: mol_type = other DNA
ctccctgcccagaggact

SEQ ID NO: 3033 - DNA, 18 bp, synthetic construct
  misc_feature 1..18: note = Synthetic
  source 1..18: mol_type = other DNA
ccctgcccagaggactaa

SEQ ID NO: 3034 - DNA, 18 bp, synthetic construct
  misc_feature 1..18: note = Synthetic
  source 1..18: mol_type = other DNA
ctgcccagaggactaaca

SEQ ID NO: 3035 - DNA, 18 bp, synthetic construct
  misc_feature 1..18: note = Synthetic
  source 1..18: mol_type = other DNA
gcccagaggactaacagg

SEQ ID NO: 3036 - DNA, 18 bp, synthetic construct
  misc_feature 1..18: note = Synthetic
  source 1..18: mol_type = other DNA
ccagaggactaacagggc

SEQ ID NO: 3037 - DNA, 18 bp, synthetic construct
  misc_feature 1..18: note = Synthetic
  source 1..18: mol_type = other DNA
agaggactaacagggcag

SEQ ID NO: 3038 - DNA, 18 bp, synthetic construct
  misc_feature 1..18: note = Synthetic
  source 1..18: mol_type = other DNA
aggactaacagggcaggt

SEQ ID NO: 3039 - DNA, 18 bp, synthetic construct
  misc_feature 1..18: note = Synthetic
  source 1..18: mol_type = other DNA
gactaacagggcaggtga

SEQ ID NO: 3040 - DNA, 18 bp, synthetic construct
  misc_feature 1..18: note = Synthetic
  source 1..18: mol_type = other DNA
ctaacagggcaggtgagg

SEQ ID NO: 3041 - DNA, 18 bp, synthetic construct
  misc_feature 1..18: note = Synthetic
  source 1..18: mol_type = other DNA
aacagggcaggtgaggag

SEQ ID NO: 3042 - DNA, 18 bp, synthetic construct
  misc_feature 1..18: note = Synthetic
  source 1..18: mol_type = other DNA
cagggcaggtgaggaggt

SEQ ID NO: 3043 - DNA, 18 bp, synthetic construct
  misc_feature 1..18: note = Synthetic
  source 1..18: mol_type = other DNA
gggcaggtgaggaggtgg

SEQ ID NO: 3044 - DNA, 18 bp, synthetic construct
  misc_feature 1..18: note = Synthetic
  source 1..18: mol_type = other DNA
gcaggtgaggaggtggga

SEQ ID NO: 3045 - DNA, 18 bp, synthetic construct
  misc_feature 1..18: note = Synthetic
  source 1..18: mol_type = other DNA
aggtgaggaggtgggaga

SEQ ID NO: 3046 - DNA, 18 bp, synthetic construct
  misc_feature 1..18: note = Synthetic
  source 1..18: mol_type = other DNA
gtgaggaggtgggagagc

SEQ ID NO: 3047 - DNA, 18 bp, synthetic construct
  misc_feature 1..18: note = Synthetic
  source 1..18: mol_type = other DNA
gaggaggtgggagagcat

SEQ ID NO: 3048 - DNA, 18 bp, synthetic construct
  misc_feature 1..18: note = Synthetic
  source 1..18: mol_type = other DNA
ggaggtgggagagcatca

SEQ ID NO: 3049 - DNA, 18 bp, synthetic construct
  misc_feature 1..18: note = Synthetic
  source 1..18: mol_type = other DNA
aggtgggagagcatcagg

SEQ ID NO: 3050 - DNA, 18 bp, synthetic construct
  misc_feature 1..18: note = Synthetic
  source 1..18: mol_type = other DNA
gtgggagagcatcaggcc

SEQ ID NO: 3051 - DNA, 18 bp, synthetic construct
  misc_feature 1..18: note = Synthetic
  source 1..18: mol_type = other DNA
gggagagcatcaggccag

SEQ ID NO: 3052 - DNA, 18 bp, synthetic construct
  misc_feature 1..18: note = Synthetic
  source 1..18: mol_type = other DNA
gagagcatcaggccaggg

SEQ ID NO: 3053 - DNA, 18 bp, synthetic construct
  misc_feature 1..18: note = Synthetic
  source 1..18: mol_type = other DNA
gagcatcaggccaggggc

SEQ ID NO: 3054 - DNA, 18 bp, synthetic construct
  misc_feature 1..18: note = Synthetic
  source 1..18: mol_type = other DNA
gcatcaggccaggggctg

SEQ ID NO: 3055 - DNA, 18 bp, synthetic construct
  misc_feature 1..18: note = Synthetic
  source 1..18: mol_type = other DNA
atcaggccaggggctggg

SEQ ID NO: 3056 - DNA, 18 bp, synthetic construct
  misc_feature 1..18: note = Synthetic
  source 1..18: mol_type = other DNA
caggccaggggctggggc

SEQ ID NO: 3057 - DNA, 18 bp, synthetic construct
  misc_feature 1..18: note = Synthetic
  source 1..18: mol_type = other DNA
ggccaggggctggggcgg

SEQ ID NO: 3058 - DNA, 18 bp, synthetic construct
  misc_feature 1..18: note = Synthetic
  source 1..18: mol_type = other DNA
ccaggggctggggcgggg

SEQ ID NO: 3059 - DNA, 18 bp, synthetic construct
  misc_feature 1..18: note = Synthetic
  source 1..18: mol_type = other DNA
aggggctggggcggggcc

SEQ ID NO: 3060 - DNA, 18 bp, synthetic construct
  misc_feature 1..18: note = Synthetic
  source 1..18: mol_type = other DNA
gggctggggcggggcctc

SEQ ID NO: 3061 - DNA, 18 bp, synthetic construct
  misc_feature 1..18: note = Synthetic
  source 1..18: mol_type = other DNA
gctggggcggggcctcat

SEQ ID NO: 3062 - DNA, 18 bp, synthetic construct
  misc_feature 1..18: note = Synthetic
  source 1..18: mol_type = other DNA
tggggcggggcctcattg

SEQ ID NO: 3063 - DNA, 18 bp, synthetic construct
  misc_feature 1..18: note = Synthetic
  source 1..18: mol_type = other DNA
ggaaaaagtttcctccat

SEQ ID NO: 3064 - DNA, 18 bp, synthetic construct
  misc_feature 1..18: note = Synthetic
  source 1..18: mol_type = other DNA
aaaaagtttcctccatcc

SEQ ID NO: 3065 - DNA, 18 bp, synthetic construct
  misc_feature 1..18: note = Synthetic
  source 1..18: mol_type = other DNA
aaagtttcctccatcctg

SEQ ID NO: 3066 - DNA, 18 bp, synthetic construct
  misc_feature 1..18: note = Synthetic
  source 1..18: mol_type = other DNA
agtttcctccatcctggc

SEQ ID NO: 3067 - DNA, 18 bp, synthetic construct
  misc_feature 1..18: note = Synthetic
  source 1..18: mol_type = other DNA
tttcctccatcctggctg

SEQ ID NO: 3068 - DNA, 18 bp, synthetic construct
  misc_feature 1..18: note = Synthetic
  source 1..18: mol_type = other DNA
tcctccatcctggctgcc

SEQ ID NO: 3069 - DNA, 18 bp, synthetic construct
  misc_feature 1..18: note = Synthetic
  source 1..18: mol_type = other DNA
ctccatcctggctgcccc

SEQ ID NO: 3070 - DNA, 18 bp, synthetic construct
  misc_feature 1..18: note = Synthetic
  source 1..18: mol_type = other DNA
ccatcctggctgcccctc

SEQ ID NO: 3071 - DNA, 18 bp, synthetic construct
  misc_feature 1..18: note = Synthetic
  source 1..18: mol_type = other DNA
atcctggctgcccctcac

SEQ ID NO: 3072 - DNA, 18 bp, synthetic construct
  misc_feature 1..18: note = Synthetic
  source 1..18: mol_type = other DNA
cctggctgcccctcacgt

SEQ ID NO: 3073 - DNA, 18 bp, synthetic construct
  misc_feature 1..18: note = Synthetic
  source 1..18: mol_type = other DNA
tggctgcccctcacgttt

SEQ ID NO: 3074 - DNA, 18 bp, synthetic construct
  misc_feature 1..18: note = Synthetic
  source 1..18: mol_type = other DNA
gctgcccctcacgtttgc

SEQ ID NO: 3075 - DNA, 18 bp, synthetic construct
  misc_feature 1..18: note = Synthetic
  source 1..18: mol_type = other DNA
tgcccctcacgtttgctc

SEQ ID NO: 3076 - DNA, 18 bp, synthetic construct
  misc_feature 1..18: note = Synthetic
  source 1..18: mol_type = other DNA
cccctcacgtttgctcct

SEQ ID NO: 3077 - DNA, 18 bp, synthetic construct
  misc_feature 1..18: note = Synthetic
  source 1..18: mol_type = other DNA
cctcacgtttgctcctct

SEQ ID NO: 3078 - DNA, 18 bp, synthetic construct
  misc_feature 1..18: note = Synthetic
  source 1..18: mol_type = other DNA
tcacgtttgctcctcttc

SEQ ID NO: 3079 - DNA, 18 bp, synthetic construct
  misc_feature 1..18: note = Synthetic
  source 1..18: mol_type = other DNA
acgtttgctcctcttcca

SEQ ID NO: 3080 - DNA, 18 bp, synthetic construct
  misc_feature 1..18: note = Synthetic
  source 1..18: mol_type = other DNA
tggccttgtccagctcgg

SEQ ID NO: 3081 - DNA, 18 bp, synthetic construct
  misc_feature 1..18: note = Synthetic
  source 1..18: mol_type = other DNA
gccttgtccagctcggtc

SEQ ID NO: 3082 - DNA, 18 bp, synthetic construct
  misc_feature 1..18: note = Synthetic
  source 1..18: mol_type = other DNA
cttgtccagctcggtcat

SEQ ID NO: 3083 - DNA, 18 bp, synthetic construct
  misc_feature 1..18: note = Synthetic
  source 1..18: mol_type = other DNA
tgtccagctcggtcatgt

SEQ ID NO: 3084 - DNA, 18 bp, synthetic construct
  misc_feature 1..18: note = Synthetic
  source 1..18: mol_type = other DNA
tccagctcggtcatgtgt

SEQ ID NO: 3085 - DNA, 18 bp, synthetic construct
  misc_feature 1..18: note = Synthetic
  source 1..18: mol_type = other DNA
cagctcggtcatgtgtcc

SEQ ID NO: 3086 - DNA, 18 bp, synthetic construct
  misc_feature 1..18: note = Synthetic
  source 1..18: mol_type = other DNA
gctcggtcatgtgtccgg

SEQ ID NO: 3087 - DNA, 18 bp, synthetic construct
  misc_feature 1..18: note = Synthetic
  source 1..18: mol_type = other DNA
tcggtcatgtgtccggac

SEQ ID NO: 3088 - DNA, 18 bp, synthetic construct
  misc_feature 1..18: note = Synthetic
  source 1..18: mol_type = other DNA
ggtcatgtgtccggacgc

SEQ ID NO: 3089 - DNA, 18 bp, synthetic construct
  misc_feature 1..18: note = Synthetic
  source 1..18: mol_type = other DNA
tcatgtgtccggacgcac

SEQ ID NO: 3090 - DNA, 18 bp, synthetic construct
  misc_feature 1..18: note = Synthetic
  source 1..18: mol_type = other DNA
atgtgtccggacgcacgg

SEQ ID NO: 3091 - DNA, 18 bp, synthetic construct
  misc_feature 1..18: note = Synthetic
  source 1..18: mol_type = other DNA
gtgtccggacgcacggtc

SEQ ID NO: 3092 - DNA, 18 bp, synthetic construct
  misc_feature 1..18: note = Synthetic
  source 1..18: mol_type = other DNA
gtccggacgcacggtccc

SEQ ID NO: 3093 - DNA, 18 bp, synthetic construct
  misc_feature 1..18: note = Synthetic
  source 1..18: mol_type = other DNA
ccggacgcacggtcccgg

SEQ ID NO: 3094 - DNA, 18 bp, synthetic construct
  misc_feature 1..18: note = Synthetic
  source 1..18: mol_type = other DNA
ggacgcacggtcccggtg

SEQ ID NO: 3095 - DNA, 18 bp, synthetic construct
  misc_feature 1..18: note = Synthetic
  source 1..18: mol_type = other DNA
acgcacggtcccggtgcc

SEQ ID NO: 3096 - DNA, 18 bp, synthetic construct
  misc_feature 1..18: note = Synthetic
  source 1..18: mol_type = other DNA
gcacggtcccggtgccct

SEQ ID NO: 3097 - DNA, 18 bp, synthetic construct
  misc_feature 1..18: note = Synthetic
  source 1..18: mol_type = other DNA
acggtcccggtgccctga

SEQ ID NO: 3098 - DNA, 18 bp, synthetic construct
  misc_feature 1..18: note = Synthetic
  source 1..18: mol_type = other DNA
ggtcccggtgccctgatg

SEQ ID NO: 3099 - DNA, 18 bp, synthetic construct
  misc_feature 1..18: note = Synthetic
  source 1..18: mol_type = other DNA
tcccggtgccctgatggt

SEQ ID NO: 3100 - DNA, 18 bp, synthetic construct
  misc_feature 1..18: note = Synthetic
  source 1..18: mol_type = other DNA
ccggtgccctgatggttc

SEQ ID NO: 3101 - DNA, 18 bp, synthetic construct
  misc_feature 1..18: note = Synthetic
  source 1..18: mol_type = other DNA
ggtgccctgatggttcta

SEQ ID NO: 3102 - DNA, 18 bp, synthetic construct
  misc_feature 1..18: note = Synthetic
  source 1..18: mol_type = other DNA
tgccctgatggttctacc

SEQ ID NO: 3103 - DNA, 18 bp, synthetic construct
  misc_feature 1..18: note = Synthetic
  source 1..18: mol_type = other DNA
ccctgatggttctacctg

SEQ ID NO: 3104 - DNA, 18 bp, synthetic construct
  misc_feature 1..18: note = Synthetic
  source 1..18: mol_type = other DNA
ctgatggttctacctgct

SEQ ID NO: 3105 - DNA, 18 bp, synthetic construct
  misc_feature 1..18: note = Synthetic
  source 1..18: mol_type = other DNA
gatggttctacctgctgt

SEQ ID NO: 3106 - DNA, 18 bp, synthetic construct
  misc_feature 1..18: note = Synthetic
  source 1..18: mol_type = other DNA
tggttctacctgctgtga

SEQ ID NO: 3107 - DNA, 18 bp, synthetic construct
  misc_feature 1..18: note = Synthetic
  source 1..18: mol_type = other DNA
gttctacctgctgtgagc

SEQ ID NO: 3108 - DNA, 18 bp, synthetic construct
  misc_feature 1..18: note = Synthetic
  source 1..18: mol_type = other DNA
tctacctgctgtgagctg

SEQ ID NO: 3109 - DNA, 18 bp, synthetic construct
  misc_feature 1..18: note = Synthetic
  source 1..18: mol_type = other DNA
tacctgctgtgagctgcc

SEQ ID NO: 3110 - DNA, 18 bp, synthetic construct
  misc_feature 1..18: note = Synthetic
  source 1..18: mol_type = other DNA
cctgctgtgagctgccca

SEQ ID NO: 3111 - DNA, 18 bp, synthetic construct
  misc_feature 1..18: note = Synthetic
  source 1..18: mol_type = other DNA
tgctgtgagctgcccagt

SEQ ID NO: 3112 - DNA, 18 bp, synthetic construct
  misc_feature 1..18: note = Synthetic
  source 1..18: mol_type = other DNA
ctgtgagctgcccagtgg

SEQ ID NO: 3113 - DNA, 18 bp, synthetic construct
  misc_feature 1..18: note = Synthetic
  source 1..18: mol_type = other DNA
gtgagctgcccagtggga

SEQ ID NO: 3114 - DNA, 18 bp, synthetic construct
  misc_feature 1..18: note = Synthetic
  source 1..18: mol_type = other DNA
gagctgcccagtgggaag

SEQ ID NO: 3115 - DNA, 18 bp, synthetic construct
  misc_feature 1..18: note = Synthetic
  source 1..18: mol_type = other DNA
gctgcccagtgggaagta

SEQ ID NO: 3116 - DNA, 18 bp, synthetic construct
  misc_feature 1..18: note = Synthetic
  source 1..18: mol_type = other DNA
tgcccagtgggaagtatg

SEQ ID NO: 3117 - DNA, 18 bp, synthetic construct
  misc_feature 1..18: note = Synthetic
  source 1..18: mol_type = other DNA
cccagtgggaagtatggc

SEQ ID NO: 3118 - DNA, 18 bp, synthetic construct
  misc_feature 1..18: note = Synthetic
  source 1..18: mol_type = other DNA
cagtgggaagtatggctg

SEQ ID NO: 3119 - DNA, 18 bp, synthetic construct
  misc_feature 1..18: note = Synthetic
  source 1..18: mol_type = other DNA
gtgggaagtatggctgct

SEQ ID NO: 3120 - DNA, 18 bp, synthetic construct
  misc_feature 1..18: note = Synthetic
  source 1..18: mol_type = other DNA
gggaagtatggctgctgc

SEQ ID NO: 3121 - DNA, 18 bp, synthetic construct
  misc_feature 1..18: note = Synthetic
  source 1..18: mol_type = other DNA
gaagtatggctgctgccc

SEQ ID NO: 3122 - DNA, 18 bp, synthetic construct
  misc_feature 1..18: note = Synthetic
  source 1..18: mol_type = other DNA
agtatggctgctgcccaa

SEQ ID NO: 3123 - DNA, 18 bp, synthetic construct
  misc_feature 1..18: note = Synthetic
  source 1..18: mol_type = other DNA
tatggctgctgcccaatg

SEQ ID NO: 3124 - DNA, 18 bp, synthetic construct
  misc_feature 1..18: note = Synthetic
  source 1..18: mol_type = other DNA
tggctgctgcccaatgcc

SEQ ID NO: 3125 - DNA, 18 bp, synthetic construct
  misc_feature 1..18: note = Synthetic
  source 1..18: mol_type = other DNA
gctgctgcccaatgccca

SEQ ID NO: 3126 - DNA, 18 bp, synthetic construct
  misc_feature 1..18: note = Synthetic
  source 1..18: mol_type = other DNA
tgctgcccaatgcccaac

SEQ ID NO: 3127 - DNA, 18 bp, synthetic construct
  misc_feature 1..18: note = Synthetic
  source 1..18: mol_type = other DNA
tgagtgaggggctggagc

SEQ ID NO: 3128 - DNA, 18 bp, synthetic construct
  misc_feature 1..18: note = Synthetic
  source 1..18: mol_type = other DNA
agtgaggggctggagcca

SEQ ID NO: 3129 - DNA, 18 bp, synthetic construct
  misc_feature 1..18: note = Synthetic
  source 1..18: mol_type = other DNA
tgaggggctggagccagc

SEQ ID NO: 3130 - DNA, 18 bp, synthetic construct
  misc_feature 1..18: note = Synthetic
  source 1..18: mol_type = other DNA
aggggctggagccagctt

SEQ ID NO: 3131 - DNA, 18 bp, synthetic construct
  misc_feature 1..18: note = Synthetic
  source 1..18: mol_type = other DNA
gggctggagccagcttgg

SEQ ID NO: 3132 - DNA, 18 bp, synthetic construct
  misc_feature 1..18: note = Synthetic
  source 1..18: mol_type = other DNA
gctggagccagcttggct

SEQ ID NO: 3133 - DNA, 18 bp, synthetic construct
  misc_feature 1..18: note = Synthetic
  source 1..18: mol_type = other DNA
tggagccagcttggctgt

SEQ ID NO: 3134 - DNA, 18 bp, synthetic construct
  misc_feature 1..18: note = Synthetic
  source 1..18: mol_type = other DNA
gagccagcttggctgtgt

SEQ ID NO: 3135 - DNA, 18 bp, synthetic construct
  misc_feature 1..18: note = Synthetic
  source 1..18: mol_type = other DNA
gccagcttggctgtgtgc

SEQ ID NO: 3136 - DNA, 18 bp, synthetic construct
  misc_feature 1..18: note = Synthetic
  source 1..18: mol_type = other DNA
cagcttggctgtgtgccc

SEQ ID NO: 3137 - DNA, 18 bp, synthetic construct
  misc_feature 1..18: note = Synthetic
  source 1..18: mol_type = other DNA
gcttggctgtgtgccccc

SEQ ID NO: 3138 - DNA, 18 bp, synthetic construct
  misc_feature 1..18: note = Synthetic
  source 1..18: mol_type = other DNA
ttggctgtgtgcccccag

SEQ ID NO: 3139 - DNA, 18 bp, synthetic construct
  misc_feature 1..18: note = Synthetic
  source 1..18: mol_type = other DNA
ggctgtgtgcccccagcc

SEQ ID NO: 3140 - DNA, 18 bp, synthetic construct
  misc_feature 1..18: note = Synthetic
  source 1..18: mol_type = other DNA
ctgtgtgcccccagccac

SEQ ID NO: 3141 - DNA, 18 bp, synthetic construct
  misc_feature 1..18: note = Synthetic
  source 1..18: mol_type = other DNA
gtgtgcccccagccacct

SEQ ID NO: 3142 - DNA, 18 bp, synthetic construct
  misc_feature 1..18: note = Synthetic
  source 1..18: mol_type = other DNA
gtgcccccagccacctgg

SEQ ID NO: 3143 - DNA, 18 bp, synthetic construct
  misc_feature 1..18: note = Synthetic
  source 1..18: mol_type = other DNA
gcccccagccacctggcc

SEQ ID NO: 3144 - DNA, 18 bp, synthetic construct
  misc_feature 1..18: note = Synthetic
  source 1..18: mol_type = other DNA
tctgtggcatggggctgg

SEQ ID NO: 3145 - DNA, 18 bp, synthetic construct
  misc_feature 1..18: note = Synthetic
  source 1..18: mol_type = other DNA
tgtggcatggggctggct

SEQ ID NO: 3146 - DNA, 18 bp, synthetic construct
  misc_feature 1..18: note = Synthetic
  source 1..18: mol_type = other DNA
tggcatggggctggctgg

SEQ ID NO: 3147 - DNA, 18 bp, synthetic construct
  misc_feature 1..18: note = Synthetic
  source 1..18: mol_type = other DNA
gagcctggctgatgcagg

SEQ ID NO: 3148 - DNA, 18 bp, synthetic construct
  misc_feature 1..18: note = Synthetic
  source 1..18: mol_type = other DNA
gcctggctgatgcagggt

SEQ ID NO: 3149 - DNA, 18 bp, synthetic construct
  misc_feature 1..18: note = Synthetic
  source 1..18: mol_type = other DNA
ctggctgatgcagggttc

SEQ ID NO: 3150 - DNA, 18 bp, synthetic construct
  misc_feature 1..18: note = Synthetic
  source 1..18: mol_type = other DNA
ggctgatgcagggttcat

SEQ ID NO: 3151 - DNA, 18 bp, synthetic construct
  misc_feature 1..18: note = Synthetic
  source 1..18: mol_type = other DNA
tgtgctactgagcctgga

SEQ ID NO: 3152 - DNA, 18 bp, synthetic construct
  misc_feature 1..18: note = Synthetic
  source 1..18: mol_type = other DNA
tgctactgagcctggaag

SEQ ID NO: 3153 - DNA, 18 bp, synthetic construct
  misc_feature 1..18: note = Synthetic
  source 1..18: mol_type = other DNA
ctactgagcctggaagtg

SEQ ID NO: 3154 - DNA, 18 bp, synthetic construct
  misc_feature 1..18: note = Synthetic
  source 1..18: mol_type = other DNA
actgagcctggaagtgac

SEQ ID NO: 3155 - DNA, 18 bp, synthetic construct
  misc_feature 1..18: note = Synthetic
  source 1..18: mol_type = other DNA
tgagcctggaagtgacaa

SEQ ID NO: 3156 - DNA, 18 bp, synthetic construct
  misc_feature 1..18: note = Synthetic
  source 1..18: mol_type = other DNA
agcctggaagtgacaaag

SEQ ID NO: 3157 - DNA, 18 bp, synthetic construct
  misc_feature 1..18: note = Synthetic
  source 1..18: mol_type = other DNA
cctggaagtgacaaagac

SEQ ID NO: 3158 - DNA, 18 bp, synthetic construct
  misc_feature 1..18: note = Synthetic
  source 1..18: mol_type = other DNA
tggaagtgacaaagaccc

SEQ ID NO: 3159 - DNA, 18 bp, synthetic construct
  misc_feature 1..18: note = Synthetic
  source 1..18: mol_type = other DNA
gaagtgacaaagacccac

SEQ ID NO: 3160 - DNA, 18 bp, synthetic construct
  misc_feature 1..18: note = Synthetic
  source 1..18: mol_type = other DNA
agtgacaaagacccaccc

SEQ ID NO: 3161 - DNA, 18 bp, synthetic construct
  misc_feature 1..18: note = Synthetic
  source 1..18: mol_type = other DNA
tgacaaagacccacccct

SEQ ID NO: 3162 - DNA, 18 bp, synthetic construct
  misc_feature 1..18: note = Synthetic
  source 1..18: mol_type = other DNA
acaaagacccacccctgt

SEQ ID NO: 3163 - DNA, 18 bp, synthetic construct
  misc_feature 1..18: note = Synthetic
  source 1..18: mol_type = other DNA
aaagacccacccctgtcc

SEQ ID NO: 3164 - DNA, 18 bp, synthetic construct
  misc_feature 1..18: note = Synthetic
  source 1..18: mol_type = other DNA
agacccacccctgtcccc

SEQ ID NO: 3165 - DNA, 18 bp, synthetic construct
  misc_feature 1..18: note = Synthetic
  source 1..18: mol_type = other DNA
acccacccctgtccccac

SEQ ID NO: 3166 - DNA, 18 bp, synthetic construct
  misc_feature 1..18: note = Synthetic
  source 1..18: mol_type = other DNA
ccacccctgtccccactc

SEQ ID NO: 3167 - DNA, 18 bp, synthetic construct
  misc_feature 1..18: note = Synthetic
  source 1..18: mol_type = other DNA
acccctgtccccactcag

SEQ ID NO: 3168 - DNA, 18 bp, synthetic construct
  misc_feature 1..18: note = Synthetic
  source 1..18: mol_type = other DNA
ccacctgctgctccgatc

SEQ ID NO: 3169 - DNA, 18 bp, synthetic construct
  misc_feature 1..18: note = Synthetic
  source 1..18: mol_type = other DNA
acctgctgctccgatcac

SEQ ID NO: 3170 - DNA, 18 bp, synthetic construct
  misc_feature 1..18: note = Synthetic
  source 1..18: mol_type = other DNA
ctgctgctccgatcacct

SEQ ID NO: 3171 - DNA, 18 bp, synthetic construct
  misc_feature 1..18: note = Synthetic
  source 1..18: mol_type = other DNA
gctgctccgatcacctgc

SEQ ID NO: 3172 - DNA, 18 bp, synthetic construct
  misc_feature 1..18: note = Synthetic
  source 1..18: mol_type = other DNA
tgctccgatcacctgcac

SEQ ID NO: 3173 - DNA, 18 bp, synthetic construct
  misc_feature 1..18: note = Synthetic
  source 1..18: mol_type = other DNA
ctccgatcacctgcactg

SEQ ID NO: 3174 - DNA, 18 bp, synthetic construct
  misc_feature 1..18: note = Synthetic
  source 1..18: mol_type = other DNA
ccgatcacctgcactgct

SEQ ID NO: 3175 - DNA, 18 bp, synthetic construct
  misc_feature 1..18: note = Synthetic
  source 1..18: mol_type = other DNA
gatcacctgcactgctgc

SEQ ID NO: 3176 - DNA, 18 bp, synthetic construct
  misc_feature 1..18: note = Synthetic
  source 1..18: mol_type = other DNA
tcacctgcactgctgccc

SEQ ID NO: 3177 - DNA, 18 bp, synthetic construct
  misc_feature 1..18: note = Synthetic
  source 1..18: mol_type = other DNA
acctgcactgctgccccc

SEQ ID NO: 3178 - DNA, 18 bp, synthetic construct
  misc_feature 1..18: note = Synthetic
  source 1..18: mol_type = other DNA
ctgcactgctgcccccaa

SEQ ID NO: 3179 - DNA, 18 bp, synthetic construct
  misc_feature 1..18: note = Synthetic
  source 1..18: mol_type = other DNA
gcactgctgcccccaaga

SEQ ID NO: 3180 - DNA, 18 bp, synthetic construct
  misc_feature 1..18: note = Synthetic
  source 1..18: mol_type = other DNA
actgctgcccccaagaca

SEQ ID NO: 3181 - DNA, 18 bp, synthetic construct
  misc_feature 1..18: note = Synthetic
  source 1..18: mol_type = other DNA
tgctgcccccaagacact

SEQ ID NO: 3182 - DNA, 18 bp, synthetic construct
  misc_feature 1..18: note = Synthetic
  source 1..18: mol_type = other DNA
ctgcccccaagacactgt

SEQ ID NO: 3183 - DNA, 18 bp, synthetic construct
  misc_feature 1..18: note = Synthetic
  source 1..18: mol_type = other DNA
gcccccaagacactgtgt

SEQ ID NO: 3184 - DNA, 18 bp, synthetic construct
  misc_feature 1..18: note = Synthetic
  source 1..18: mol_type = other DNA
ccccaagacactgtgtgt

SEQ ID NO: 3185 - DNA, 18 bp, synthetic construct
  misc_feature 1..18: note = Synthetic
  source 1..18: mol_type = other DNA
ccaagacactgtgtgtga

SEQ ID NO: 3186 - DNA, 18 bp, synthetic construct
  misc_feature 1..18: note = Synthetic
  source 1..18: mol_type = other DNA
aagacactgtgtgtgacc

SEQ ID NO: 3187 - DNA, 18 bp, synthetic construct
  misc_feature 1..18: note = Synthetic
  source 1..18: mol_type = other DNA
gacactgtgtgtgacctg

SEQ ID NO: 3188 - DNA, 18 bp, synthetic construct
  misc_feature 1..18: note = Synthetic
  source 1..18: mol_type = other DNA
cactgtgtgtgacctgat

SEQ ID NO: 3189 - DNA, 18 bp, synthetic construct
  misc_feature 1..18: note = Synthetic
  source 1..18: mol_type = other DNA
ctgtgtgtgacctgatcc

SEQ ID NO: 3190 - DNA, 18 bp, synthetic construct
  misc_feature 1..18: note = Synthetic
  source 1..18: mol_type = other DNA
gtgtgtgacctgatccag

SEQ ID NO: 3191 - DNA, 18 bp, synthetic construct
  misc_feature 1..18: note = Synthetic
  source 1..18: mol_type = other DNA
gtgtgacctgatccagag

SEQ ID NO: 3192 - DNA, 18 bp, synthetic construct
  misc_feature 1..18: note = Synthetic
  source 1..18: mol_type = other DNA
gtgacctgatccagagta

SEQ ID NO: 3193 - DNA, 18 bp, synthetic construct
  misc_feature 1..18: note = Synthetic
  source 1..18: mol_type = other DNA
gacctgatccagagtaag

SEQ ID NO: 3194 - DNA, 18 bp, synthetic construct
  misc_feature 1..18: note = Synthetic
  source 1..18: mol_type = other DNA
cctgatccagagtaagtg

SEQ ID NO: 3195 - DNA, 18 bp, synthetic construct
  misc_feature 1..18: note = Synthetic
  source 1..18: mol_type = other DNA
tgatccagagtaagtgcc

SEQ ID NO: 3196 - DNA, 18 bp, synthetic construct
  misc_feature 1..18: note = Synthetic
  source 1..18: mol_type = other DNA
atccagagtaagtgcctc

SEQ ID NO: 3197 - DNA, 18 bp, synthetic construct
  misc_feature 1..18: note = Synthetic
  source 1..18: mol_type = other DNA
ccagagtaagtgcctctc

SEQ ID NO: 3198 - DNA, 18 bp, synthetic construct
  misc_feature 1..18: note = Synthetic
  source 1..18: mol_type = other DNA
agagtaagtgcctctcca

SEQ ID NO: 3199 - DNA, 18 bp, synthetic construct
  misc_feature 1..18: note = Synthetic
  source 1..18: mol_type = other DNA
agtaagtgcctctccaag

SEQ ID NO: 3200 - DNA, 18 bp, synthetic construct
  misc_feature 1..18: note = Synthetic
  source 1..18: mol_type = other DNA
taagtgcctctccaagga

SEQ ID NO: 3201 - DNA, 18 bp, synthetic construct
  misc_feature 1..18: note = Synthetic
  source 1..18: mol_type = other DNA
agtgcctctccaaggaga

SEQ ID NO: 3202 - DNA, 18 bp, synthetic construct
  misc_feature 1..18: note = Synthetic
  source 1..18: mol_type = other DNA
tgcctctccaaggagaac

SEQ ID NO: 3203 - DNA, 18 bp, synthetic construct
  misc_feature 1..18: note = Synthetic
  source 1..18: mol_type = other DNA
cctctccaaggagaacgc

SEQ ID NO: 3204 - DNA, 18 bp, synthetic construct
  misc_feature 1..18: note = Synthetic
  source 1..18: mol_type = other DNA
tctccaaggagaacgcta

SEQ ID NO: 3205 - DNA, 18 bp, synthetic construct
  misc_feature 1..18: note = Synthetic
  source 1..18: mol_type = other DNA
tccaaggagaacgctacc

SEQ ID NO: 3206 - DNA, 18 bp, synthetic construct
  misc_feature 1..18: note = Synthetic
  source 1..18: mol_type = other DNA
caaggagaacgctaccac

SEQ ID NO: 3207 - DNA, 18 bp, synthetic construct
  misc_feature 1..18: note = Synthetic
  source 1..18: mol_type = other DNA
aggagaacgctaccacgg

SEQ ID NO: 3208 - DNA, 18 bp, synthetic construct
  misc_feature 1..18: note = Synthetic
  source 1..18: mol_type = other DNA
gagaacgctaccacggac

SEQ ID NO: 3209 - DNA, 18 bp, synthetic construct
  misc_feature 1..18: note = Synthetic
  source 1..18: mol_type = other DNA
gaacgctaccacggacct

SEQ ID NO: 3210 - DNA, 18 bp, synthetic construct
  misc_feature 1..18: note = Synthetic
  source 1..18: mol_type = other DNA
acgctaccacggacctcc

SEQ ID NO: 3211 - DNA, 18 bp, synthetic construct
  misc_feature 1..18: note = Synthetic
  source 1..18: mol_type = other DNA
gctaccacggacctcctc

SEQ ID NO: 3212 - DNA, 18 bp, synthetic construct
  misc_feature 1..18: note = Synthetic
  source 1..18: mol_type = other DNA
taccacggacctcctcac

SEQ ID NO: 3213 - DNA, 18 bp, synthetic construct
  misc_feature 1..18: note = Synthetic
  source 1..18: mol_type = other DNA
ccacggacctcctcacta

SEQ ID NO: 3214 - DNA, 18 bp, synthetic construct
  misc_feature 1..18: note = Synthetic
  source 1..18: mol_type = other DNA
acggacctcctcactaag

SEQ ID NO: 3215 - DNA, 18 bp, synthetic construct
  misc_feature 1..18: note = Synthetic
  source 1..18: mol_type = other DNA
ggacctcctcactaagct

SEQ ID NO: 3216 - DNA, 18 bp, synthetic construct
  misc_feature 1..18: note = Synthetic
  source 1..18: mol_type = other DNA
acctcctcactaagctgc

SEQ ID NO: 3217 - DNA, 18 bp, synthetic construct
  misc_feature 1..18: note = Synthetic
  source 1..18: mol_type = other DNA
ctcctcactaagctgcct

SEQ ID NO: 3218 - DNA, 18 bp, synthetic construct
  misc_feature 1..18: note = Synthetic
  source 1..18: mol_type = other DNA
cctcactaagctgcctgc

SEQ ID NO: 3219 - DNA, 18 bp, synthetic construct
  misc_feature 1..18: note = Synthetic
  source 1..18: mol_type = other DNA
tcactaagctgcctgcgc

SEQ ID NO: 3220 - DNA, 18 bp, synthetic construct
  misc_feature 1..18: note = Synthetic
  source 1..18: mol_type = other DNA
actaagctgcctgcgcac

SEQ ID NO: 3221 - DNA, 18 bp, synthetic construct
  misc_feature 1..18: note = Synthetic
  source 1..18: mol_type = other DNA
taagctgcctgcgcacac

SEQ ID NO: 3222 - DNA, 18 bp, synthetic construct
  misc_feature 1..18: note = Synthetic
  source 1..18: mol_type = other DNA
agctgcctgcgcacacag

SEQ ID NO: 3223 - DNA, 18 bp, synthetic construct
  misc_feature 1..18: note = Synthetic
  source 1..18: mol_type = other DNA
taccagaggcagggtgca

SEQ ID NO: 3224 - DNA, 18 bp, synthetic construct
  misc_feature 1..18: note = Synthetic
  source 1..18: mol_type = other DNA
ccagaggcagggtgcaga

SEQ ID NO: 3225 - DNA, 18 bp, synthetic construct
  misc_feature 1..18: note = Synthetic
  source 1..18: mol_type = other DNA
agaggcagggtgcagata

SEQ ID NO: 3226 - DNA, 18 bp, synthetic construct
  misc_feature 1..18: note = Synthetic
  source 1..18: mol_type = other DNA
aggcagggtgcagataca

SEQ ID NO: 3227 - DNA, 18 bp, synthetic construct
  misc_feature 1..18: note = Synthetic
  source 1..18: mol_type = other DNA
gcagggtgcagatacagg

SEQ ID NO: 3228 - DNA, 18 bp, synthetic construct
  misc_feature 1..18: note = Synthetic
  source 1..18: mol_type = other DNA
agggtgcagatacagggg

SEQ ID NO: 3229 - DNA, 18 bp, synthetic construct
  misc_feature 1..18: note = Synthetic
  source 1..18: mol_type = other DNA
ggtgcagatacaggggtg

SEQ ID NO: 3230 - DNA, 18 bp, synthetic construct
  misc_feature 1..18: note = Synthetic
  source 1..18: mol_type = other DNA
tgcagatacaggggtggg

SEQ ID NO: 3231 - DNA, 18 bp, synthetic construct
  misc_feature 1..18: note = Synthetic
  source 1..18: mol_type = other DNA
cagatacaggggtggggc

SEQ ID NO: 3232 - DNA, 18 bp, synthetic construct
  misc_feature 1..18: note = Synthetic
  source 1..18: mol_type = other DNA
gatacaggggtggggccc

SEQ ID NO: 3233 - DNA, 18 bp, synthetic construct
  misc_feature 1..18: note = Synthetic
  source 1..18: mol_type = other DNA
tacaggggtggggccccc

SEQ ID NO: 3234 - DNA, 18 bp, synthetic construct
  misc_feature 1..18: note = Synthetic
  source 1..18: mol_type = other DNA
caggggtggggccccctt

SEQ ID NO: 3235 - DNA, 18 bp, synthetic construct
  misc_feature 1..18: note = Synthetic
  source 1..18: mol_type = other DNA
ggggtggggccccctttc

SEQ ID NO: 3236 - DNA, 18 bp, synthetic construct
  misc_feature 1..18: note = Synthetic
  source 1..18: mol_type = other DNA
ggtggggccccctttcct

SEQ ID NO: 3237 - DNA, 18 bp, synthetic construct
  misc_feature 1..18: note = Synthetic
  source 1..18: mol_type = other DNA
tggggccccctttcctcc

SEQ ID NO: 3238 - DNA, 18 bp, synthetic construct
  misc_feature 1..18: note = Synthetic
  source 1..18: mol_type = other DNA
gggccccctttcctccct

SEQ ID NO: 3239 - DNA, 18 bp, synthetic construct
  misc_feature 1..18: note = Synthetic
  source 1..18: mol_type = other DNA
gccccctttcctcccttt

SEQ ID NO: 3240 - DNA, 18 bp, synthetic construct
  misc_feature 1..18: note = Synthetic
  source 1..18: mol_type = other DNA
cccctttcctccctttta

SEQ ID NO: 3241 - DNA, 18 bp, synthetic construct
  misc_feature 1..18: note = Synthetic
  source 1..18: mol_type = other DNA
cctttcctcccttttagg

SEQ ID NO: 3242 - DNA, 18 bp, synthetic construct
  misc_feature 1..18: note = Synthetic
  source 1..18: mol_type = other DNA
tttcctcccttttaggcc

SEQ ID NO: 3243 - DNA, 18 bp, synthetic construct
  misc_feature 1..18: note = Synthetic
  source 1..18: mol_type = other DNA
tcctcccttttaggcctg

SEQ ID NO: 3244 - DNA, 18 bp, synthetic construct
  misc_feature 1..18: note = Synthetic
  source 1..18: mol_type = other DNA
ctcccttttaggcctggc

SEQ ID NO: 3245 - DNA, 18 bp, synthetic construct
  misc_feature 1..18: note = Synthetic
  source 1..18: mol_type = other DNA
cccttttaggcctggcct

SEQ ID NO: 3246 - DNA, 18 bp, synthetic construct
  misc_feature 1..18: note = Synthetic
  source 1..18: mol_type = other DNA
cttttaggcctggcctta

SEQ ID NO: 3247 - DNA, 18 bp, synthetic construct
  misc_feature 1..18: note = Synthetic
  source 1..18: mol_type = other DNA
tttaggcctggccttagg

SEQ ID NO: 3248 - DNA, 18 bp, synthetic construct
  misc_feature 1..18: note = Synthetic
  source 1..18: mol_type = other DNA
taggcctggccttaggat

SEQ ID NO: 3249 - DNA, 18 bp, synthetic construct
  misc_feature 1..18: note = Synthetic
  source 1..18: mol_type = other DNA
ggcctggccttaggatca

SEQ ID NO: 3250 - DNA, 18 bp, synthetic construct
  misc_feature 1..18: note = Synthetic
  source 1..18: mol_type = other DNA
cctggccttaggatcact

SEQ ID NO: 3251 - DNA, 18 bp, synthetic construct
  misc_feature 1..18: note = Synthetic
  source 1..18: mol_type = other DNA
tggccttaggatcactgc

SEQ ID NO: 3252 - DNA, 18 bp, synthetic construct
  misc_feature 1..18: note = Synthetic
  source 1..18: mol_type = other DNA
gccttaggatcactgcaa

SEQ ID NO: 3253 - DNA, 18 bp, synthetic construct
  misc_feature 1..18: note = Synthetic
  source 1..18: mol_type = other DNA
cttaggatcactgcaagg

SEQ ID NO: 3254 - DNA, 18 bp, synthetic construct
  misc_feature 1..18: note = Synthetic
  source 1..18: mol_type = other DNA
taggatcactgcaaggtg

SEQ ID NO: 3255 - DNA, 18 bp, synthetic construct
  misc_feature 1..18: note = Synthetic
  source 1..18: mol_type = other DNA
ggatcactgcaaggtggt

SEQ ID NO: 3256 - DNA, 18 bp, synthetic construct
  misc_feature 1..18: note = Synthetic
  source 1..18: mol_type = other DNA
atcactgcaaggtggtgt

SEQ ID NO: 3257 - DNA, 18 bp, synthetic construct
  misc_feature 1..18: note = Synthetic
  source 1..18: mol_type = other DNA
ctgagggtccccagtgcc

SEQ ID NO: 3258 - DNA, 18 bp, synthetic construct
  misc_feature 1..18: note = Synthetic
  source 1..18: mol_type = other DNA
gagggtccccagtgccac

SEQ ID NO: 3259 - DNA, 18 bp, synthetic construct
  misc_feature 1..18: note = Synthetic
  source 1..18: mol_type = other DNA
gggtccccagtgccactt

SEQ ID NO: 3260 - DNA, 18 bp, synthetic construct
  misc_feature 1..18: note = Synthetic
  source 1..18: mol_type = other DNA
gtccccagtgccacttct

SEQ ID NO: 3261 - DNA, 18 bp, synthetic construct
  misc_feature 1..18: note = Synthetic
  source 1..18: mol_type = other DNA
ccccagtgccacttctga

SEQ ID NO: 3262 - DNA, 18 bp, synthetic construct
  misc_feature 1..18: note = Synthetic
  source 1..18: mol_type = other DNA
ccagtgccacttctgacc

SEQ ID NO: 3263 - DNA, 18 bp, synthetic construct
  misc_feature 1..18: note = Synthetic
  source 1..18: mol_type = other DNA
agtgccacttctgacctg

SEQ ID NO: 3264 - DNA, 18 bp, synthetic construct
  misc_feature 1..18: note = Synthetic
  source 1..18: mol_type = other DNA
tgccacttctgacctgtc

SEQ ID NO: 3265 - DNA, 18 bp, synthetic construct
  misc_feature 1..18: note = Synthetic
  source 1..18: mol_type = other DNA
ccacttctgacctgtcct

SEQ ID NO: 3266 - DNA, 18 bp, synthetic construct
  misc_feature 1..18: note = Synthetic
  source 1..18: mol_type = other DNA
acttctgacctgtcctct

SEQ ID NO: 3267 - DNA, 18 bp, synthetic construct
  misc_feature 1..18: note = Synthetic
  source 1..18: mol_type = other DNA
ttctgacctgtcctctct

SEQ ID NO: 3268 - DNA, 18 bp, synthetic construct
  misc_feature 1..18: note = Synthetic
  source 1..18: mol_type = other DNA
ctgacctgtcctctctgc

SEQ ID NO: 3269 - DNA, 18 bp, synthetic construct
  misc_feature 1..18: note = Synthetic
  source 1..18: mol_type = other DNA
gacctgtcctctctgctt

SEQ ID NO: 3270 - DNA, 18 bp, synthetic construct
  misc_feature 1..18: note = Synthetic
  source 1..18: mol_type = other DNA
cctgtcctctctgcttcc

SEQ ID NO: 3271 - DNA, 18 bp, synthetic construct
  misc_feature 1..18: note = Synthetic
  source 1..18: mol_type = other DNA
tgtcctctctgcttccct

SEQ ID NO: 3272 - DNA, 18 bp, synthetic construct
  misc_feature 1..18: note = Synthetic
  source 1..18: mol_type = other DNA
tcctctctgcttccctca

SEQ ID NO: 3273 - DNA, 18 bp, synthetic construct
  misc_feature 1..18: note = Synthetic
  source 1..18: mol_type = other DNA
ctctctgcttccctcaca

SEQ ID NO: 3274 - DNA, 18 bp, synthetic construct
  misc_feature 1..18: note = Synthetic
  source 1..18: mol_type = other DNA
tgggggatgtgaaatgtg

SEQ ID NO: 3275 - DNA, 18 bp, synthetic construct
  misc_feature 1..18: note = Synthetic
  source 1..18: mol_type = other DNA
ggggatgtgaaatgtgac

SEQ ID NO: 3276 - DNA, 18 bp, synthetic construct
  misc_feature 1..18: note = Synthetic
  source 1..18: mol_type = other DNA
ggatgtgaaatgtgacat

SEQ ID NO: 3277 - DNA, 18 bp, synthetic construct
  misc_feature 1..18: note = Synthetic
  source 1..18: mol_type = other DNA
atgtgaaatgtgacatgg

SEQ ID NO: 3278 - DNA, 18 bp, synthetic construct
  misc_feature 1..18: note = Synthetic
  source 1..18: mol_type = other DNA
gtgaaatgtgacatggag

SEQ ID NO: 3279 - DNA, 18 bp, synthetic construct
  misc_feature 1..18: note = Synthetic
  source 1..18: mol_type = other DNA
gaaatgtgacatggaggt

SEQ ID NO: 3280 - DNA, 18 bp, synthetic construct
  misc_feature 1..18: note = Synthetic
  source 1..18: mol_type = other DNA
aatgtgacatggaggtga

SEQ ID NO: 3281 - DNA, 18 bp, synthetic construct
  misc_feature 1..18: note = Synthetic
  source 1..18: mol_type = other DNA
tgtgacatggaggtgagc

SEQ ID NO: 3282 - DNA, 18 bp, synthetic construct
  misc_feature 1..18: note = Synthetic
  source 1..18: mol_type = other DNA
tgacatggaggtgagctg

SEQ ID NO: 3283 - DNA, 18 bp, synthetic construct
  misc_feature 1..18: note = Synthetic
  source 1..18: mol_type = other DNA
acatggaggtgagctgcc

SEQ ID NO: 3284 - DNA, 18 bp, synthetic construct
  misc_feature 1..18: note = Synthetic
  source 1..18: mol_type = other DNA
atggaggtgagctgccca

SEQ ID NO: 3285 - DNA, 18 bp, synthetic construct
  misc_feature 1..18: note = Synthetic
  source 1..18: mol_type = other DNA
ggaggtgagctgcccaga

SEQ ID NO: 3286 - DNA, 18 bp, synthetic construct
  misc_feature 1..18: note = Synthetic
  source 1..18: mol_type = other DNA
aggtgagctgcccagatg

SEQ ID NO: 3287 - DNA, 18 bp, synthetic construct
  misc_feature 1..18: note = Synthetic
  source 1..18: mol_type = other DNA
gtgagctgcccagatggc

SEQ ID NO: 3288 - DNA, 18 bp, synthetic construct
  misc_feature 1..18: note = Synthetic
  source 1..18: mol_type = other DNA
gagctgcccagatggcta

SEQ ID NO: 3289 - DNA, 18 bp, synthetic construct
  misc_feature 1..18: note = Synthetic
  source 1..18: mol_type = other DNA
gctgcccagatggctata

SEQ ID NO: 3290 - DNA, 18 bp, synthetic construct
  misc_feature 1..18: note = Synthetic
  source 1..18: mol_type = other DNA
tgcccagatggctatacc

SEQ ID NO: 3291 - DNA, 18 bp, synthetic construct
  misc_feature 1..18: note = Synthetic
  source 1..18: mol_type = other DNA
cccagatggctatacctg

SEQ ID NO: 3292 - DNA, 18 bp, synthetic construct
  misc_feature 1..18: note = Synthetic
  source 1..18: mol_type = other DNA
cagatggctatacctgct

SEQ ID NO: 3293 - DNA, 18 bp, synthetic construct
  misc_feature 1..18: note = Synthetic
  source 1..18: mol_type = other DNA
gatggctatacctgctgc

SEQ ID NO: 3294 - DNA, 18 bp, synthetic construct
  misc_feature 1..18: note = Synthetic
  source 1..18: mol_type = other DNA
tggctatacctgctgccg

SEQ ID NO: 3295 - DNA, 18 bp, synthetic construct
  misc_feature 1..18: note = Synthetic
  source 1..18: mol_type = other DNA
gctatacctgctgccgtc

SEQ ID NO: 3296 - DNA, 18 bp, synthetic construct
  misc_feature 1..18: note = Synthetic
  source 1..18: mol_type = other DNA
tatacctgctgccgtcta

SEQ ID NO: 3297 - DNA, 18 bp, synthetic construct
  misc_feature 1..18: note = Synthetic
  source 1..18: mol_type = other DNA
tacctgctgccgtctaca

SEQ ID NO: 3298 - DNA, 18 bp, synthetic construct
  misc_feature 1..18: note = Synthetic
  source 1..18: mol_type = other DNA
cctgctgccgtctacagt

SEQ ID NO: 3299 - DNA, 18 bp, synthetic construct
  misc_feature 1..18: note = Synthetic
  source 1..18: mol_type = other DNA
tgctgccgtctacagtcg

SEQ ID NO: 3300 - DNA, 18 bp, synthetic construct
  misc_feature 1..18: note = Synthetic
  source 1..18: mol_type = other DNA
ctgccgtctacagtcggg

SEQ ID NO: 3301 - DNA, 18 bp, synthetic construct
  misc_feature 1..18: note = Synthetic
  source 1..18: mol_type = other DNA
gccgtctacagtcggggg

SEQ ID NO: 3302 - DNA, 18 bp, synthetic construct
  misc_feature 1..18: note = Synthetic
  source 1..18: mol_type = other DNA
cgtctacagtcgggggcc

SEQ ID NO: 3303 - DNA, 18 bp, synthetic construct
  misc_feature 1..18: note = Synthetic
  source 1..18: mol_type = other DNA
tctacagtcgggggcctg

SEQ ID NO: 3304 - DNA, 18 bp, synthetic construct
  misc_feature 1..18: note = Synthetic
  source 1..18: mol_type = other DNA
tacagtcgggggcctggg

SEQ ID NO: 3305 - DNA, 18 bp, synthetic construct
  misc_feature 1..18: note = Synthetic
  source 1..18: mol_type = other DNA
cagtcgggggcctggggc

SEQ ID NO: 3306 - DNA, 18 bp, synthetic construct
  misc_feature 1..18: note = Synthetic
  source 1..18: mol_type = other DNA
gtcgggggcctggggctg

SEQ ID NO: 3307 - DNA, 18 bp, synthetic construct
  misc_feature 1..18: note = Synthetic
  source 1..18: mol_type = other DNA
cgggggcctggggctgct

SEQ ID NO: 3308 - DNA, 18 bp, synthetic construct
  misc_feature 1..18: note = Synthetic
  source 1..18: mol_type = other DNA
ggggcctggggctgctgc

SEQ ID NO: 3309 - DNA, 18 bp, synthetic construct
  misc_feature 1..18: note = Synthetic
  source 1..18: mol_type = other DNA
ggcctggggctgctgccc

SEQ ID NO: 3310 - DNA, 18 bp, synthetic construct
  misc_feature 1..18: note = Synthetic
  source 1..18: mol_type = other DNA
cctggggctgctgccctt

SEQ ID NO: 3311 - DNA, 18 bp, synthetic construct
  misc_feature 1..18: note = Synthetic
  source 1..18: mol_type = other DNA
tggggctgctgccctttt

SEQ ID NO: 3312 - DNA, 18 bp, synthetic construct
  misc_feature 1..18: note = Synthetic
  source 1..18: mol_type = other DNA
gggctgctgcccttttac

SEQ ID NO: 3313 - DNA, 18 bp, synthetic construct
  misc_feature 1..18: note = Synthetic
  source 1..18: mol_type = other DNA
gctgctgcccttttaccc

SEQ ID NO: 3314 - DNA, 18 bp, synthetic construct
  misc_feature 1..18: note = Synthetic
  source 1..18: mol_type = other DNA
tgctgcccttttacccag

SEQ ID NO: 3315 - DNA, 18 bp, synthetic construct
  misc_feature 1..18: note = Synthetic
  source 1..18: mol_type = other DNA
ctgcccttttacccaggt

SEQ ID NO: 3316 - DNA, 18 bp, synthetic construct
  misc_feature 1..18: note = Synthetic
  source 1..18: mol_type = other DNA
gcccttttacccaggtac

SEQ ID NO: 3317 - DNA, 18 bp, synthetic construct
  misc_feature 1..18: note = Synthetic
  source 1..18: mol_type = other DNA
ccttttacccaggtaccc

SEQ ID NO: 3318 - DNA, 18 bp, synthetic construct
  misc_feature 1..18: note = Synthetic
  source 1..18: mol_type = other DNA
ttttacccaggtacccag

SEQ ID NO: 3319 - DNA, 18 bp, synthetic construct
  misc_feature 1..18: note = Synthetic
  source 1..18: mol_type = other DNA
ttacccaggtacccaggg

SEQ ID NO: 3320 - DNA, 18 bp, synthetic construct
  misc_feature 1..18: note = Synthetic
  source 1..18: mol_type = other DNA
acccaggtacccaggggt

SEQ ID NO: 3321 - DNA, 18 bp, synthetic construct
  misc_feature 1..18: note = Synthetic
  source 1..18: mol_type = other DNA
ccaggtacccaggggtgg

SEQ ID NO: 3322 - DNA, 18 bp, synthetic construct
  misc_feature 1..18: note = Synthetic
  source 1..18: mol_type = other DNA
aggtacccaggggtggcg

SEQ ID NO: 3323 - DNA, 18 bp, synthetic construct
  misc_feature 1..18: note = Synthetic
  source 1..18: mol_type = other DNA
gtacccaggggtggcggg

SEQ ID NO: 3324 - DNA, 18 bp, synthetic construct
  misc_feature 1..18: note = Synthetic
  source 1..18: mol_type = other DNA
acccaggggtggcgggtg

SEQ ID NO: 3325 - DNA, 18 bp, synthetic construct
  misc_feature 1..18: note = Synthetic
  source 1..18: mol_type = other DNA
ccaggggtggcgggtggg

SEQ ID NO: 3326 - DNA, 18 bp, synthetic construct
  misc_feature 1..18: note = Synthetic
  source 1..18: mol_type = other DNA
aggggtggcgggtgggtg

SEQ ID NO: 3327 - DNA, 18 bp, synthetic construct
  misc_feature 1..18: note = Synthetic
  source 1..18: mol_type = other DNA
gggtggcgggtgggtggg

SEQ ID NO: 3328 - DNA, 18 bp, synthetic construct
  misc_feature 1..18: note = Synthetic
  source 1..18: mol_type = other DNA
gtggcgggtgggtgggct

SEQ ID NO: 3329 - DNA, 18 bp, synthetic construct
  misc_feature 1..18: note = Synthetic
  source 1..18: mol_type = other DNA
ggcgggtgggtgggctga

SEQ ID NO: 3330 - DNA, 18 bp, synthetic construct
  misc_feature 1..18: note = Synthetic
  source 1..18: mol_type = other DNA
cgggtgggtgggctgagc

SEQ ID NO: 3331 - DNA, 18 bp, synthetic construct
  misc_feature 1..18: note = Synthetic
  source 1..18: mol_type = other DNA
ggtgggtgggctgagcac

SEQ ID NO: 3332 - DNA, 18 bp, synthetic construct
  misc_feature 1..18: note = Synthetic
  source 1..18: mol_type = other DNA
tgggtgggctgagcacag

SEQ ID NO: 3333 - DNA, 18 bp, synthetic construct
  misc_feature 1..18: note = Synthetic
  source 1..18: mol_type = other DNA
ggtgggctgagcacagtg

SEQ ID NO: 3334 - DNA, 18 bp, synthetic construct
  misc_feature 1..18: note = Synthetic
  source 1..18: mol_type = other DNA
tgggctgagcacagtgtg

SEQ ID NO: 3335 - DNA, 18 bp, synthetic construct
  misc_feature 1..18: note = Synthetic
  source 1..18: mol_type = other DNA
ggctgagcacagtgtggc

SEQ ID NO: 3336 - DNA, 18 bp, synthetic construct
  misc_feature 1..18: note = Synthetic
  source 1..18: mol_type = other DNA
ctgagcacagtgtggcag

SEQ ID NO: 3337 - DNA, 18 bp, synthetic construct
  misc_feature 1..18: note = Synthetic
  source 1..18: mol_type = other DNA
gagcacagtgtggcaggc

SEQ ID NO: 3338 - DNA, 18 bp, synthetic construct
  misc_feature 1..18: note = Synthetic
  source 1..18: mol_type = other DNA
gcacagtgtggcaggcag

SEQ ID NO: 3339 - DNA, 18 bp, synthetic construct
  misc_feature 1..18: note = Synthetic
  source 1..18: mol_type = other DNA
acagtgtggcaggcagcc

SEQ ID NO: 3340 - DNA, 18 bp, synthetic construct
  misc_feature 1..18: note = Synthetic
  source 1..18: mol_type = other DNA
tggcaggcagccgggccc

SEQ ID NO: 3341 - DNA, 18 bp, synthetic construct
  misc_feature 1..18: note = Synthetic
  source 1..18: mol_type = other DNA
gcaggcagccgggcccca

SEQ ID NO: 3342 - DNA, 18 bp, synthetic construct
  misc_feature 1..18: note = Synthetic
  source 1..18: mol_type = other DNA
aggcagccgggccccagt

SEQ ID NO: 3343 - DNA, 18 bp, synthetic construct
  misc_feature 1..18: note = Synthetic
  source 1..18: mol_type = other DNA
gcagccgggccccagtgc

SEQ ID NO: 3344 - DNA, 18 bp, synthetic construct
  misc_feature 1..18: note = Synthetic
  source 1..18: mol_type = other DNA
agccgggccccagtgccc

SEQ ID NO: 3345 - DNA, 18 bp, synthetic construct
  misc_feature 1..18: note = Synthetic
  source 1..18: mol_type = other DNA
ccgggccccagtgcccac

SEQ ID NO: 3346 - DNA, 18 bp, synthetic construct
  misc_feature 1..18: note = Synthetic
  source 1..18: mol_type = other DNA
gggccccagtgcccacct

SEQ ID NO: 3347 - DNA, 18 bp, synthetic construct
  misc_feature 1..18: note = Synthetic
  source 1..18: mol_type = other DNA
gccccagtgcccacctgc

SEQ ID NO: 3348 - DNA, 18 bp, synthetic construct
  misc_feature 1..18: note = Synthetic
  source 1..18: mol_type = other DNA
cccagtgcccacctgccc

SEQ ID NO: 3349 - DNA, 18 bp, synthetic construct
  misc_feature 1..18: note = Synthetic
  source 1..18: mol_type = other DNA
cagtgcccacctgccctt

SEQ ID NO: 3350 - DNA, 18 bp, synthetic construct
  misc_feature 1..18: note = Synthetic
  source 1..18: mol_type = other DNA
gtgcccacctgcccttct

SEQ ID NO: 3351 - DNA, 18 bp, synthetic construct
  misc_feature 1..18: note = Synthetic
  source 1..18: mol_type = other DNA
gcccacctgcccttcttc

SEQ ID NO: 3352 - DNA, 18 bp, synthetic construct
  misc_feature 1..18: note = Synthetic
  source 1..18: mol_type = other DNA
ccacctgcccttcttcat

SEQ ID NO: 3353 - DNA, 18 bp, synthetic construct
  misc_feature 1..18: note = Synthetic
  source 1..18: mol_type = other DNA
acctgcccttcttcatct

SEQ ID NO: 3354 - DNA, 18 bp, synthetic construct
  misc_feature 1..18: note = Synthetic
  source 1..18: mol_type = other DNA
ctgcccttcttcatctgc

SEQ ID NO: 3355 - DNA, 18 bp, synthetic construct
  misc_feature 1..18: note = Synthetic
  source 1..18: mol_type = other DNA
gcccttcttcatctgccc

SEQ ID NO: 3356 - DNA, 18 bp, synthetic construct
  misc_feature 1..18: note = Synthetic
  source 1..18: mol_type = other DNA
ccttcttcatctgcccta

SEQ ID NO: 3357 - DNA, 18 bp, synthetic construct
  misc_feature 1..18: note = Synthetic
  source 1..18: mol_type = other DNA
gctgtgtgctgtgaggac

SEQ ID NO: 3358 - DNA, 18 bp, synthetic construct
  misc_feature 1..18: note = Synthetic
  source 1..18: mol_type = other DNA
tgtgtgctgtgaggacca

SEQ ID NO: 3359 - DNA, 18 bp, synthetic construct
  misc_feature 1..18: note = Synthetic
  source 1..18: mol_type = other DNA
tgtgctgtgaggaccaca

SEQ ID NO: 3360 - DNA, 18 bp, synthetic construct
  misc_feature 1..18: note = Synthetic
  source 1..18: mol_type = other DNA
tgctgtgaggaccacata

SEQ ID NO: 3361 - DNA, 18 bp, synthetic construct
  misc_feature 1..18: note = Synthetic
  source 1..18: mol_type = other DNA
ctgtgaggaccacataca

SEQ ID NO: 3362 - DNA, 18 bp, synthetic construct
  misc_feature 1..18: note = Synthetic
  source 1..18: mol_type = other DNA
gtgaggaccacatacact

SEQ ID NO: 3363 - DNA, 18 bp, synthetic construct
  misc_feature 1..18: note = Synthetic
  source 1..18: mol_type = other DNA
gaggaccacatacactgc

SEQ ID NO: 3364 - DNA, 18 bp, synthetic construct
  misc_feature 1..18: note = Synthetic
  source 1..18: mol_type = other DNA
ggaccacatacactgctg

SEQ ID NO: 3365 - DNA, 18 bp, synthetic construct
  misc_feature 1..18: note = Synthetic
  source 1..18: mol_type = other DNA
accacatacactgctgtc

SEQ ID NO: 3366 - DNA, 18 bp, synthetic construct
  misc_feature 1..18: note = Synthetic
  source 1..18: mol_type = other DNA
cacatacactgctgtccc

SEQ ID NO: 3367 - DNA, 18 bp, synthetic construct
  misc_feature 1..18: note = Synthetic
  source 1..18: mol_type = other DNA
catacactgctgtcccgc

SEQ ID NO: 3368 - DNA, 18 bp, synthetic construct
  misc_feature 1..18: note = Synthetic
  source 1..18: mol_type = other DNA
tacactgctgtcccgcgg

SEQ ID NO: 3369 - DNA, 18 bp, synthetic construct
  misc_feature 1..18: note = Synthetic
  source 1..18: mol_type = other DNA
cactgctgtcccgcgggg

SEQ ID NO: 3370 - DNA, 18 bp, synthetic construct
  misc_feature 1..18: note = Synthetic
  source 1..18: mol_type = other DNA
ctgctgtcccgcggggtt

SEQ ID NO: 3371 - DNA, 18 bp, synthetic construct
  misc_feature 1..18: note = Synthetic
  source 1..18: mol_type = other DNA
gctgtcccgcggggttta

SEQ ID NO: 3372 - DNA, 18 bp, synthetic construct
  misc_feature 1..18: note = Synthetic
  source 1..18: mol_type = other DNA
tgtcccgcggggtttacg

SEQ ID NO: 3373 - DNA, 18 bp, synthetic construct
  misc_feature 1..18: note = Synthetic
  source 1..18: mol_type = other DNA
tcccgcggggtttacgtg

SEQ ID NO: 3374 - DNA, 18 bp, synthetic construct
  misc_feature 1..18: note = Synthetic
  source 1..18: mol_type = other DNA
ccgcggggtttacgtgtg

SEQ ID NO: 3375 - DNA, 18 bp, synthetic construct
  misc_feature 1..18: note = Synthetic
  source 1..18: mol_type = other DNA
gcggggtttacgtgtgac

SEQ ID NO: 3376 - DNA, 18 bp, synthetic construct
  misc_feature 1..18: note = Synthetic
  source 1..18: mol_type = other DNA
ggggtttacgtgtgacac

SEQ ID NO: 3377 - DNA, 18 bp, synthetic construct
  misc_feature 1..18: note = Synthetic
  source 1..18: mol_type = other DNA
ggtttacgtgtgacacgc

SEQ ID NO: 3378 - DNA, 18 bp, synthetic construct
  misc_feature 1..18: note = Synthetic
  source 1..18: mol_type = other DNA
tttacgtgtgacacgcag

SEQ ID NO: 3379 - DNA, 18 bp, synthetic construct
  misc_feature 1..18: note = Synthetic
  source 1..18: mol_type = other DNA
tacgtgtgacacgcagaa

SEQ ID NO: 3380 - DNA, 18 bp, synthetic construct
  misc_feature 1..18: note = Synthetic
  source 1..18: mol_type = other DNA
cgtgtgacacgcagaagg

SEQ ID NO: 3381 - DNA, 18 bp, synthetic construct
  misc_feature 1..18: note = Synthetic
  source 1..18: mol_type = other DNA
tgtgacacgcagaagggt

SEQ ID NO: 3382 - DNA, 18 bp, synthetic construct
  misc_feature 1..18: note = Synthetic
  source 1..18: mol_type = other DNA
tgacacgcagaagggtac

SEQ ID NO: 3383 - DNA, 18 bp, synthetic construct
  misc_feature 1..18: note = Synthetic
  source 1..18: mol_type = other DNA
acacgcagaagggtacct

SEQ ID NO: 3384 - DNA, 18 bp, synthetic construct
  misc_feature 1..18: note = Synthetic
  source 1..18: mol_type = other DNA
acgcagaagggtacctgt

SEQ ID NO: 3385 - DNA, 18 bp, synthetic construct
  misc_feature 1..18: note = Synthetic
  source 1..18: mol_type = other DNA
gcagaagggtacctgtga

SEQ ID NO: 3386 - DNA, 18 bp, synthetic construct
  misc_feature 1..18: note = Synthetic
  source 1..18: mol_type = other DNA
agaagggtacctgtgaac

SEQ ID NO: 3387 - DNA, 18 bp, synthetic construct
  misc_feature 1..18: note = Synthetic
  source 1..18: mol_type = other DNA
aagggtacctgtgaacag

SEQ ID NO: 3388 - DNA, 18 bp, synthetic construct
  misc_feature 1..18: note = Synthetic
  source 1..18: mol_type = other DNA
gggtacctgtgaacaggg

SEQ ID NO: 3389 - DNA, 18 bp, synthetic construct
  misc_feature 1..18: note = Synthetic
  source 1..18: mol_type = other DNA
gtacctgtgaacaggggc

SEQ ID NO: 3390 - DNA, 18 bp, synthetic construct
  misc_feature 1..18: note = Synthetic
  source 1..18: mol_type = other DNA
acctgtgaacaggggccc

SEQ ID NO: 3391 - DNA, 18 bp, synthetic construct
  misc_feature 1..18: note = Synthetic
  source 1..18: mol_type = other DNA
ctgtgaacaggggcccca

SEQ ID NO: 3392 - DNA, 18 bp, synthetic construct
  misc_feature 1..18: note = Synthetic
  source 1..18: mol_type = other DNA
gtgaacaggggccccacc

SEQ ID NO: 3393 - DNA, 18 bp, synthetic construct
  misc_feature 1..18: note = Synthetic
  source 1..18: mol_type = other DNA
gaacaggggccccaccag

SEQ ID NO: 3394 - DNA, 18 bp, synthetic construct
  misc_feature 1..18: note = Synthetic
  source 1..18: mol_type = other DNA
acaggggccccaccaggt

SEQ ID NO: 3395 - DNA, 18 bp, synthetic construct
  misc_feature 1..18: note = Synthetic
  source 1..18: mol_type = other DNA
aggggccccaccaggtgc

SEQ ID NO: 3396 - DNA, 18 bp, synthetic construct
  misc_feature 1..18: note = Synthetic
  source 1..18: mol_type = other DNA
gggccccaccaggtgccc

SEQ ID NO: 3397 - DNA, 18 bp, synthetic construct
  misc_feature 1..18: note = Synthetic
  source 1..18: mol_type = other DNA
gccccaccaggtgccctg

SEQ ID NO: 3398 - DNA, 18 bp, synthetic construct
  misc_feature 1..18: note = Synthetic
  source 1..18: mol_type = other DNA
cccaccaggtgccctgga

SEQ ID NO: 3399 - DNA, 18 bp, synthetic construct
  misc_feature 1..18: note = Synthetic
  source 1..18: mol_type = other DNA
caccaggtgccctggatg

SEQ ID NO: 3400 - DNA, 18 bp, synthetic construct
  misc_feature 1..18: note = Synthetic
  source 1..18: mol_type = other DNA
ccaggtgccctggatgga

SEQ ID NO: 3401 - DNA, 18 bp, synthetic construct
  misc_feature 1..18: note = Synthetic
  source 1..18: mol_type = other DNA
aggtgccctggatggaga

SEQ ID NO: 3402 - DNA, 18 bp, synthetic construct
  misc_feature 1..18: note = Synthetic
  source 1..18: mol_type = other DNA
gtgccctggatggagaag

SEQ ID NO: 3403 - DNA, 18 bp, synthetic construct
  misc_feature 1..18: note = Synthetic
  source 1..18: mol_type = other DNA
gccctggatggagaaggc

SEQ ID NO: 3404 - DNA, 18 bp, synthetic construct
  misc_feature 1..18: note = Synthetic
  source 1..18: mol_type = other DNA
cctggatggagaaggccc

SEQ ID NO: 3405 - DNA, 18 bp, synthetic construct
  misc_feature 1..18: note = Synthetic
  source 1..18: mol_type = other DNA
tggatggagaaggcccca

SEQ ID NO: 3406 - DNA, 18 bp, synthetic construct
  misc_feature 1..18: note = Synthetic
  source 1..18: mol_type = other DNA
gatggagaaggccccagc

SEQ ID NO: 3407 - DNA, 18 bp, synthetic construct
  misc_feature 1..18: note = Synthetic
  source 1..18: mol_type = other DNA
tggagaaggccccagctc

SEQ ID NO: 3408 - DNA, 18 bp, synthetic construct
  misc_feature 1..18: note = Synthetic
  source 1..18: mol_type = other DNA
gagaaggccccagctcac

SEQ ID NO: 3409 - DNA, 18 bp, synthetic construct
  misc_feature 1..18: note = Synthetic
  source 1..18: mol_type = other DNA
gaaggccccagctcacct

SEQ ID NO: 3410 - DNA, 18 bp, synthetic construct
  misc_feature 1..18: note = Synthetic
  source 1..18: mol_type = other DNA
aggccccagctcacctca

SEQ ID NO: 3411 - DNA, 18 bp, synthetic construct
  misc_feature 1..18: note = Synthetic
  source 1..18: mol_type = other DNA
gccccagctcacctcagc

SEQ ID NO: 3412 - DNA, 18 bp, synthetic construct
  misc_feature 1..18: note = Synthetic
  source 1..18: mol_type = other DNA
cccagctcacctcagcct

SEQ ID NO: 3413 - DNA, 18 bp, synthetic construct
  misc_feature 1..18: note = Synthetic
  source 1..18: mol_type = other DNA
cagctcacctcagcctgc

SEQ ID NO: 3414 - DNA, 18 bp, synthetic construct
  misc_feature 1..18: note = Synthetic
  source 1..18: mol_type = other DNA
gctcacctcagcctgcca

SEQ ID NO: 3415 - DNA, 18 bp, synthetic construct
  misc_feature 1..18: note = Synthetic
  source 1..18: mol_type = other DNA
tcacctcagcctgccaga

SEQ ID NO: 3416 - DNA, 18 bp, synthetic construct
  misc_feature 1..18: note = Synthetic
  source 1..18: mol_type = other DNA
acctcagcctgccagacc

SEQ ID NO: 3417 - DNA, 18 bp, synthetic construct
  misc_feature 1..18: note = Synthetic
  source 1..18: mol_type = other DNA
ctcagcctgccagaccca

SEQ ID NO: 3418 - DNA, 18 bp, synthetic construct
  misc_feature 1..18: note = Synthetic
  source 1..18: mol_type = other DNA
cagcctgccagacccaca

SEQ ID NO: 3419 - DNA, 18 bp, synthetic construct
  misc_feature 1..18: note = Synthetic
  source 1..18: mol_type = other DNA
gcctgccagacccacaag

SEQ ID NO: 3420 - DNA, 18 bp, synthetic construct
  misc_feature 1..18: note = Synthetic
  source 1..18: mol_type = other DNA
ctgccagacccacaagcc

SEQ ID NO: 3421 - DNA, 18 bp, synthetic construct
  misc_feature 1..18: note = Synthetic
  source 1..18: mol_type = other DNA
gccagacccacaagcctt

SEQ ID NO: 3422 - DNA, 18 bp, synthetic construct
  misc_feature 1..18: note = Synthetic
  source 1..18: mol_type = other DNA
cagacccacaagccttga

SEQ ID NO: 3423 - DNA, 18 bp, synthetic construct
  misc_feature 1..18: note = Synthetic
  source 1..18: mol_type = other DNA
gacccacaagccttgaag

SEQ ID NO: 3424 - DNA, 18 bp, synthetic construct
  misc_feature 1..18: note = Synthetic
  source 1..18: mol_type = other DNA
cccacaagccttgaagag

SEQ ID NO: 3425 - DNA, 18 bp, synthetic construct
  misc_feature 1..18: note = Synthetic
  source 1..18: mol_type = other DNA
cacaagccttgaagagag

SEQ ID NO: 3426 - DNA, 18 bp, synthetic construct
  misc_feature 1..18: note = Synthetic
  source 1..18: mol_type = other DNA
caagccttgaagagagat

SEQ ID NO: 3427 - DNA, 18 bp, synthetic construct
  misc_feature 1..18: note = Synthetic
  source 1..18: mol_type = other DNA
agccttgaagagagatgt

SEQ ID NO: 3428 - DNA, 18 bp, synthetic construct
  misc_feature 1..18: note = Synthetic
  source 1..18: mol_type = other DNA
ccttgaagagagatgtcc

SEQ ID NO: 3429 - DNA, 18 bp, synthetic construct
  misc_feature 1..18: note = Synthetic
  source 1..18: mol_type = other DNA
ttgaagagagatgtcccc

SEQ ID NO: 3430 - DNA, 18 bp, synthetic construct
  misc_feature 1..18: note = Synthetic
  source 1..18: mol_type = other DNA
gaagagagatgtcccctg

SEQ ID NO: 3431 - DNA, 18 bp, synthetic construct
  misc_feature 1..18: note = Synthetic
  source 1..18: mol_type = other DNA
agagagatgtcccctgtg

SEQ ID NO: 3432 - DNA, 18 bp, synthetic construct
  misc_feature 1..18: note = Synthetic
  source 1..18: mol_type = other DNA
agagatgtcccctgtgat

SEQ ID NO: 3433 - DNA, 18 bp, synthetic construct
  misc_feature 1..18: note = Synthetic
  source 1..18: mol_type = other DNA
agatgtcccctgtgataa

SEQ ID NO: 3434 - DNA, 18 bp, synthetic construct
  misc_feature 1..18: note = Synthetic
  source 1..18: mol_type = other DNA
atgtcccctgtgataatg

SEQ ID NO: 3435 - DNA, 18 bp, synthetic construct
  misc_feature 1..18: note = Synthetic
  source 1..18: mol_type = other DNA
gtcccctgtgataatgtc

SEQ ID NO: 3436 - DNA, 18 bp, synthetic construct
  misc_feature 1..18: note = Synthetic
  source 1..18: mol_type = other DNA
cccctgtgataatgtcag

SEQ ID NO: 3437 - DNA, 18 bp, synthetic construct
  misc_feature 1..18: note = Synthetic
  source 1..18: mol_type = other DNA
cctgtgataatgtcagca

SEQ ID NO: 3438 - DNA, 18 bp, synthetic construct
  misc_feature 1..18: note = Synthetic
  source 1..18: mol_type = other DNA
tgtgataatgtcagcagc

SEQ ID NO: 3439 - DNA, 18 bp, synthetic construct
  misc_feature 1..18: note = Synthetic
  source 1..18: mol_type = other DNA
tgataatgtcagcagctg

SEQ ID NO: 3440 - DNA, 18 bp, synthetic construct
  misc_feature 1..18: note = Synthetic
  source 1..18: mol_type = other DNA
ataatgtcagcagctgtc

SEQ ID NO: 3441 - DNA, 18 bp, synthetic construct
  misc_feature 1..18: note = Synthetic
  source 1..18: mol_type = other DNA
aatgtcagcagctgtccc

SEQ ID NO: 3442 - DNA, 18 bp, synthetic construct
  misc_feature 1..18: note = Synthetic
  source 1..18: mol_type = other DNA
tgtcagcagctgtccctc

SEQ ID NO: 3443 - DNA, 18 bp, synthetic construct
  misc_feature 1..18: note = Synthetic
  source 1..18: mol_type = other DNA
tcagcagctgtccctcct

SEQ ID NO: 3444 - DNA, 18 bp, synthetic construct
  misc_feature 1..18: note = Synthetic
  source 1..18: mol_type = other DNA
agcagctgtccctcctcc

SEQ ID NO: 3445 - DNA, 18 bp, synthetic construct
  misc_feature 1..18: note = Synthetic
  source 1..18: mol_type = other DNA
cagctgtccctcctccga

SEQ ID NO: 3446 - DNA, 18 bp, synthetic construct
  misc_feature 1..18: note = Synthetic
  source 1..18: mol_type = other DNA
gctgtccctcctccgata

SEQ ID NO: 3447 - DNA, 18 bp, synthetic construct
  misc_feature 1..18: note = Synthetic
  source 1..18: mol_type = other DNA
tgtccctcctccgatacc

SEQ ID NO: 3448 - DNA, 18 bp, synthetic construct
  misc_feature 1..18: note = Synthetic
  source 1..18: mol_type = other DNA
tccctcctccgatacctg

SEQ ID NO: 3449 - DNA, 18 bp, synthetic construct
  misc_feature 1..18: note = Synthetic
  source 1..18: mol_type = other DNA
cctcctccgatacctgct

SEQ ID NO: 3450 - DNA, 18 bp, synthetic construct
  misc_feature 1..18: note = Synthetic
  source 1..18: mol_type = other DNA
tcctccgatacctgctgc

SEQ ID NO: 3451 - DNA, 18 bp, synthetic construct
  misc_feature 1..18: note = Synthetic
  source 1..18: mol_type = other DNA
ctccgatacctgctgcca

SEQ ID NO: 3452 - DNA, 18 bp, synthetic construct
  misc_feature 1..18: note = Synthetic
  source 1..18: mol_type = other DNA
ccgatacctgctgccaac

SEQ ID NO: 3453 - DNA, 18 bp, synthetic construct
  misc_feature 1..18: note = Synthetic
  source 1..18: mol_type = other DNA
gatacctgctgccaactc

SEQ ID NO: 3454 - DNA, 18 bp, synthetic construct
  misc_feature 1..18: note = Synthetic
  source 1..18: mol_type = other DNA
tacctgctgccaactcac

SEQ ID NO: 3455 - DNA, 18 bp, synthetic construct
  misc_feature 1..18: note = Synthetic
  source 1..18: mol_type = other DNA
cctgctgccaactcacgt

SEQ ID NO: 3456 - DNA, 18 bp, synthetic construct
  misc_feature 1..18: note = Synthetic
  source 1..18: mol_type = other DNA
tgctgccaactcacgtct

SEQ ID NO: 3457 - DNA, 18 bp, synthetic construct
  misc_feature 1..18: note = Synthetic
  source 1..18: mol_type = other DNA
ctgccaactcacgtctgg

SEQ ID NO: 3458 - DNA, 18 bp, synthetic construct
  misc_feature 1..18: note = Synthetic
  source 1..18: mol_type = other DNA
gccaactcacgtctgggg

SEQ ID NO: 3459 - DNA, 18 bp, synthetic construct
  misc_feature 1..18: note = Synthetic
  source 1..18: mol_type = other DNA
caactcacgtctggggag

SEQ ID NO: 3460 - DNA, 18 bp, synthetic construct
  misc_feature 1..18: note = Synthetic
  source 1..18: mol_type = other DNA
actcacgtctggggagtg

SEQ ID NO: 3461 - DNA, 18 bp, synthetic construct
  misc_feature 1..18: note = Synthetic
  source 1..18: mol_type = other DNA
tcacgtctggggagtggg

SEQ ID NO: 3462 - DNA, 18 bp, synthetic construct
  misc_feature 1..18: note = Synthetic
  source 1..18: mol_type = other DNA
acgtctggggagtggggc

SEQ ID NO: 3463 - DNA, 18 bp, synthetic construct
  misc_feature 1..18: note = Synthetic
  source 1..18: mol_type = other DNA
gtctggggagtggggctg

SEQ ID NO: 3464 - DNA, 18 bp, synthetic construct
  misc_feature 1..18: note = Synthetic
  source 1..18: mol_type = other DNA
ctggggagtggggctgct

SEQ ID NO: 3465 - DNA, 18 bp, synthetic construct
  misc_feature 1..18: note = Synthetic
  source 1..18: mol_type = other DNA
ggggagtggggctgctgt

SEQ ID NO: 3466 - DNA, 18 bp, synthetic construct
  misc_feature 1..18: note = Synthetic
  source 1..18: mol_type = other DNA
ggagtggggctgctgtcc

SEQ ID NO: 3467 - DNA, 18 bp, synthetic construct
  misc_feature 1..18: note = Synthetic
  source 1..18: mol_type = other DNA
agtggggctgctgtccaa

SEQ ID NO: 3468 - DNA, 18 bp, synthetic construct
  misc_feature 1..18: note = Synthetic
  source 1..18: mol_type = other DNA
tggggctgctgtccaatc

SEQ ID NO: 3469 - DNA, 18 bp, synthetic construct
  misc_feature 1..18: note = Synthetic
  source 1..18: mol_type = other DNA
gggctgctgtccaatccc

SEQ ID NO: 3470 - DNA, 18 bp, synthetic construct
  misc_feature 1..18: note = Synthetic
  source 1..18: mol_type = other DNA
gctgctgtccaatcccag

SEQ ID NO: 3471 - DNA, 18 bp, synthetic construct
  misc_feature 1..18: note = Synthetic
  source 1..18: mol_type = other DNA
tgctgtccaatcccagag

SEQ ID NO: 3472 - DNA, 18 bp, synthetic construct
  misc_feature 1..18: note = Synthetic
  source 1..18: mol_type = other DNA
tatatgggaggggacagc

SEQ ID NO: 3473 - DNA, 18 bp, synthetic construct
  misc_feature 1..18: note = Synthetic
  source 1..18: mol_type = other DNA
tatgggaggggacagcat

SEQ ID NO: 3474 - DNA, 18 bp, synthetic construct
  misc_feature 1..18: note = Synthetic
  source 1..18: mol_type = other DNA
tgggaggggacagcatct

SEQ ID NO: 3475 - DNA, 18 bp, synthetic construct
  misc_feature 1..18: note = Synthetic
  source 1..18: mol_type = other DNA
ggaggggacagcatcttg

SEQ ID NO: 3476 - DNA, 18 bp, synthetic construct
  misc_feature 1..18: note = Synthetic
  source 1..18: mol_type = other DNA
aggggacagcatcttggc

SEQ ID NO: 3477 - DNA, 18 bp, synthetic construct
  misc_feature 1..18: note = Synthetic
  source 1..18: mol_type = other DNA
gggacagcatcttggcct

SEQ ID NO: 3478 - DNA, 18 bp, synthetic construct
  misc_feature 1..18: note = Synthetic
  source 1..18: mol_type = other DNA
gacagcatcttggcctgg

SEQ ID NO: 3479 - DNA, 18 bp, synthetic construct
  misc_feature 1..18: note = Synthetic
  source 1..18: mol_type = other DNA
cagcatcttggcctgggc

SEQ ID NO: 3480 - DNA, 18 bp, synthetic construct
  misc_feature 1..18: note = Synthetic
  source 1..18: mol_type = other DNA
gcatcttggcctgggcag

SEQ ID NO: 3481 - DNA, 18 bp, synthetic construct
  misc_feature 1..18: note = Synthetic
  source 1..18: mol_type = other DNA
atcttggcctgggcaggt

SEQ ID NO: 3482 - DNA, 18 bp, synthetic construct
  misc_feature 1..18: note = Synthetic
  source 1..18: mol_type = other DNA
cttggcctgggcaggtgg

SEQ ID NO: 3483 - DNA, 18 bp, synthetic construct
  misc_feature 1..18: note = Synthetic
  source 1..18: mol_type = other DNA
tggcctgggcaggtgggt

SEQ ID NO: 3484 - DNA, 18 bp, synthetic construct
  misc_feature 1..18: note = Synthetic
  source 1..18: mol_type = other DNA
gcctgggcaggtgggtgg

SEQ ID NO: 3485 - DNA, 18 bp, synthetic construct
  misc_feature 1..18: note = Synthetic
  source 1..18: mol_type = other DNA
ctgggcaggtgggtggcc

SEQ ID NO: 3486 - DNA, 18 bp, synthetic construct
  misc_feature 1..18: note = Synthetic
  source 1..18: mol_type = other DNA
gggcaggtgggtggccaa

SEQ ID NO: 3487 - DNA, 18 bp, synthetic construct
  misc_feature 1..18: note = Synthetic
  source 1..18: mol_type = other DNA
gcaggtgggtggccaagc

SEQ ID NO: 3488 - DNA, 18 bp, synthetic construct
  misc_feature 1..18: note = Synthetic
  source 1..18: mol_type = other DNA
aggtgggtggccaagctc

SEQ ID NO: 3489 - DNA, 18 bp, synthetic construct
  misc_feature 1..18: note = Synthetic
  source 1..18: mol_type = other DNA
gcgccccacatagtggct

SEQ ID NO: 3490 - DNA, 18 bp, synthetic construct
  misc_feature 1..18: note = Synthetic
  source 1..18: mol_type = other DNA
gccccacatagtggctac

SEQ ID NO: 3491 - DNA, 18 bp, synthetic construct
  misc_feature 1..18: note = Synthetic
  source 1..18: mol_type = other DNA
cccacatagtggctacct

SEQ ID NO: 3492 - DNA, 18 bp, synthetic construct
  misc_feature 1..18: note = Synthetic
  source 1..18: mol_type = other DNA
cacatagtggctacctac

SEQ ID NO: 3493 - DNA, 18 bp, synthetic construct
  misc_feature 1..18: note = Synthetic
  source 1..18: mol_type = other DNA
catagtggctacctacaa

SEQ ID NO: 3494 - DNA, 18 bp, synthetic construct
  misc_feature 1..18: note = Synthetic
  source 1..18: mol_type = other DNA
tagtggctacctacaacg

SEQ ID NO: 3495 - DNA, 18 bp, synthetic construct
  misc_feature 1..18: note = Synthetic
  source 1..18: mol_type = other DNA
gtggctacctacaacgcc

SEQ ID NO: 3496 - DNA, 18 bp, synthetic construct
  misc_feature 1..18: note = Synthetic
  source 1..18: mol_type = other DNA
ggctacctacaacgccct

SEQ ID NO: 3497 - DNA, 18 bp, synthetic construct
  misc_feature 1..18: note = Synthetic
  source 1..18: mol_type = other DNA
ctacctacaacgcccttt

SEQ ID NO: 3498 - DNA, 18 bp, synthetic construct
  misc_feature 1..18: note = Synthetic
  source 1..18: mol_type = other DNA
acctacaacgccctttcc

SEQ ID NO: 3499 - DNA, 18 bp, synthetic construct
  misc_feature 1..18: note = Synthetic
  source 1..18: mol_type = other DNA
ctacaacgccctttcctg

SEQ ID NO: 3500 - DNA, 18 bp, synthetic construct
  misc_feature 1..18: note = Synthetic
  source 1..18: mol_type = other DNA
acaacgccctttcctgcc

SEQ ID NO: 3501 - DNA, 18 bp, synthetic construct
  misc_feature 1..18: note = Synthetic
  source 1..18: mol_type = other DNA
aacgccctttcctgccca

SEQ ID NO: 3502 - DNA, 18 bp, synthetic construct
  misc_feature 1..18: note = Synthetic
  source 1..18: mol_type = other DNA
cgccctttcctgcccacc

SEQ ID NO: 3503 - DNA, 18 bp, synthetic construct
  misc_feature 1..18: note = Synthetic
  source 1..18: mol_type = other DNA
ccctttcctgcccacccc

SEQ ID NO: 3504 - DNA, 18 bp, synthetic construct
  misc_feature 1..18: note = Synthetic
  source 1..18: mol_type = other DNA
ctttcctgcccacccccc

SEQ ID NO: 3505 - DNA, 18 bp, synthetic construct
  misc_feature 1..18: note = Synthetic
  source 1..18: mol_type = other DNA
ttcctgcccaccccccag

SEQ ID NO: 3506 - DNA, 18 bp, synthetic construct
  misc_feature 1..18: note = Synthetic
  source 1..18: mol_type = other DNA
ctgtctgctgctcggacc

SEQ ID NO: 3507 - DNA, 18 bp, synthetic construct
  misc_feature 1..18: note = Synthetic
  source 1..18: mol_type = other DNA
gtctgctgctcggaccac

SEQ ID NO: 3508 - DNA, 18 bp, synthetic construct
  misc_feature 1..18: note = Synthetic
  source 1..18: mol_type = other DNA
ctgctgctcggaccacca

SEQ ID NO: 3509 - DNA, 18 bp, synthetic construct
  misc_feature 1..18: note = Synthetic
  source 1..18: mol_type = other DNA
gctgctcggaccaccagc

SEQ ID NO: 3510 - DNA, 18 bp, synthetic construct
  misc_feature 1..18: note = Synthetic
  source 1..18: mol_type = other DNA
tgctcggaccaccagcac

SEQ ID NO: 3511 - DNA, 18 bp, synthetic construct
  misc_feature 1..18: note = Synthetic
  source 1..18: mol_type = other DNA
ctcggaccaccagcactg

SEQ ID NO: 3512 - DNA, 18 bp, synthetic construct
  misc_feature 1..18: note = Synthetic
  source 1..18: mol_type = other DNA
cggaccaccagcactgct

SEQ ID NO: 3513 - DNA, 18 bp, synthetic construct
  misc_feature 1..18: note = Synthetic
  source 1..18: mol_type = other DNA
gaccaccagcactgctgc

SEQ ID NO: 3514 - DNA, 18 bp, synthetic construct
  misc_feature 1..18: note = Synthetic
  source 1..18: mol_type = other DNA
ccaccagcactgctgccc

SEQ ID NO: 3515 - DNA, 18 bp, synthetic construct
  misc_feature 1..18: note = Synthetic
  source 1..18: mol_type = other DNA
accagcactgctgccccc

SEQ ID NO: 3516 - DNA, 18 bp, synthetic construct
  misc_feature 1..18: note = Synthetic
  source 1..18: mol_type = other DNA
cagcactgctgcccccag

SEQ ID NO: 3517 - DNA, 18 bp, synthetic construct
  misc_feature 1..18: note = Synthetic
  source 1..18: mol_type = other DNA
gcactgctgcccccaggg

SEQ ID NO: 3518 - DNA, 18 bp, synthetic construct
  misc_feature 1..18: note = Synthetic
  source 1..18: mol_type = other DNA
actgctgcccccagggct

SEQ ID NO: 3519 - DNA, 18 bp, synthetic construct
  misc_feature 1..18: note = Synthetic
  source 1..18: mol_type = other DNA
tgctgcccccagggctac

SEQ ID NO: 3520 - DNA, 18 bp, synthetic construct
  misc_feature 1..18: note = Synthetic
  source 1..18: mol_type = other DNA
ctgcccccagggctacac

SEQ ID NO: 3521 - DNA, 18 bp, synthetic construct
  misc_feature 1..18: note = Synthetic
  source 1..18: mol_type = other DNA
gcccccagggctacacgt

SEQ ID NO: 3522 - DNA, 18 bp, synthetic construct
  misc_feature 1..18: note = Synthetic
  source 1..18: mol_type = other DNA
ccccagggctacacgtgt

SEQ ID NO: 3523 - DNA, 18 bp, synthetic construct
  misc_feature 1..18: note = Synthetic
  source 1..18: mol_type = other DNA
ccagggctacacgtgtgt

SEQ ID NO: 3524 - DNA, 18 bp, synthetic construct
  misc_feature 1..18: note = Synthetic
  source 1..18: mol_type = other DNA
agggctacacgtgtgtag

SEQ ID NO: 3525 - DNA, 18 bp, synthetic construct
  misc_feature 1..18: note = Synthetic
  source 1..18: mol_type = other DNA
ggctacacgtgtgtagct

SEQ ID NO: 3526 - DNA, 18 bp, synthetic construct
  misc_feature 1..18: note = Synthetic
  source 1..18: mol_type = other DNA
ctacacgtgtgtagctga

SEQ ID NO: 3527 - DNA, 18 bp, synthetic construct
  misc_feature 1..18: note = Synthetic
  source 1..18: mol_type = other DNA
acacgtgtgtagctgagg

SEQ ID NO: 3528 - DNA, 18 bp, synthetic construct
  misc_feature 1..18: note = Synthetic
  source 1..18: mol_type = other DNA
acgtgtgtagctgagggg

SEQ ID NO: 3529 - DNA, 18 bp, synthetic construct
  misc_feature 1..18: note = Synthetic
  source 1..18: mol_type = other DNA
gtgtgtagctgaggggca

SEQ ID NO: 3530 - DNA, 18 bp, synthetic construct
  misc_feature 1..18: note = Synthetic
  source 1..18: mol_type = other DNA
gtgtagctgaggggcagt

SEQ ID NO: 3531 - DNA, 18 bp, synthetic construct
  misc_feature 1..18: note = Synthetic
  source 1..18: mol_type = other DNA
gtagctgaggggcagtgt

SEQ ID NO: 3532 - DNA, 18 bp, synthetic construct
  misc_feature 1..18: note = Synthetic
  source 1..18: mol_type = other DNA
agctgaggggcagtgtca

SEQ ID NO: 3533 - DNA, 18 bp, synthetic construct
  misc_feature 1..18: note = Synthetic
  source 1..18: mol_type = other DNA
ctgaggggcagtgtcagc

SEQ ID NO: 3534 - DNA, 18 bp, synthetic construct
  misc_feature 1..18: note = Synthetic
  source 1..18: mol_type = other DNA
gaggggcagtgtcagcga

SEQ ID NO: 3535 - DNA, 18 bp, synthetic construct
  misc_feature 1..18: note = Synthetic
  source 1..18: mol_type = other DNA
ggggcagtgtcagcgagg

SEQ ID NO: 3536 - DNA, 18 bp, synthetic construct
  misc_feature 1..18: note = Synthetic
  source 1..18: mol_type = other DNA
ggcagtgtcagcgaggaa

SEQ ID NO: 3537 - DNA, 18 bp, synthetic construct
  misc_feature 1..18: note = Synthetic
  source 1..18: mol_type = other DNA
cagtgtcagcgaggaagc

SEQ ID NO: 3538 - DNA, 18 bp, synthetic construct
  misc_feature 1..18: note = Synthetic
  source 1..18: mol_type = other DNA
gtgtcagcgaggaagcga

SEQ ID NO: 3539 - DNA, 18 bp, synthetic construct
  misc_feature 1..18: note = Synthetic
  source 1..18: mol_type = other DNA
gtcagcgaggaagcgaga

SEQ ID NO: 3540 - DNA, 18 bp, synthetic construct
  misc_feature 1..18: note = Synthetic
  source 1..18: mol_type = other DNA
cagcgaggaagcgagatc

SEQ ID NO: 3541 - DNA, 18 bp, synthetic construct
  misc_feature 1..18: note = Synthetic
  source 1..18: mol_type = other DNA
gcgaggaagcgagatcgt

SEQ ID NO: 3542 - DNA, 18 bp, synthetic construct
  misc_feature 1..18: note = Synthetic
  source 1..18: mol_type = other DNA
gaggaagcgagatcgtgg

SEQ ID NO: 3543 - DNA, 18 bp, synthetic construct
  misc_feature 1..18: note = Synthetic
  source 1..18: mol_type = other DNA
ggaagcgagatcgtggct

SEQ ID NO: 3544 - DNA, 18 bp, synthetic construct
  misc_feature 1..18: note = Synthetic
  source 1..18: mol_type = other DNA
aagcgagatcgtggctgg

SEQ ID NO: 3545 - DNA, 18 bp, synthetic construct
  misc_feature 1..18: note = Synthetic
  source 1..18: mol_type = other DNA
gcgagatcgtggctggac

SEQ ID NO: 3546 - DNA, 18 bp, synthetic construct
  misc_feature 1..18: note = Synthetic
  source 1..18: mol_type = other DNA
gagatcgtggctggactg

SEQ ID NO: 3547 - DNA, 18 bp, synthetic construct
  misc_feature 1..18: note = Synthetic
  source 1..18: mol_type = other DNA
gatcgtggctggactgga

SEQ ID NO: 3548 - DNA, 18 bp, synthetic construct
  misc_feature 1..18: note = Synthetic
  source 1..18: mol_type = other DNA
tcgtggctggactggaga

SEQ ID NO: 3549 - DNA, 18 bp, synthetic construct
  misc_feature 1..18: note = Synthetic
  source 1..18: mol_type = other DNA
gtggctggactggagaag

SEQ ID NO: 3550 - DNA, 18 bp, synthetic construct
  misc_feature 1..18: note = Synthetic
  source 1..18: mol_type = other DNA
ggctggactggagaagat

SEQ ID NO: 3551 - DNA, 18 bp, synthetic construct
  misc_feature 1..18: note = Synthetic
  source 1..18: mol_type = other DNA
ctggactggagaagatgc

SEQ ID NO: 3552 - DNA, 18 bp, synthetic construct
  misc_feature 1..18: note = Synthetic
  source 1..18: mol_type = other DNA
ggactggagaagatgcct

SEQ ID NO: 3553 - DNA, 18 bp, synthetic construct
  misc_feature 1..18: note = Synthetic
  source 1..18: mol_type = other DNA
actggagaagatgcctgc

SEQ ID NO: 3554 - DNA, 18 bp, synthetic construct
  misc_feature 1..18: note = Synthetic
  source 1..18: mol_type = other DNA
tggagaagatgcctgccc

SEQ ID NO: 3555 - DNA, 18 bp, synthetic construct
  misc_feature 1..18: note = Synthetic
  source 1..18: mol_type = other DNA
gagaagatgcctgcccgc

SEQ ID NO: 3556 - DNA, 18 bp, synthetic construct
  misc_feature 1..18: note = Synthetic
  source 1..18: mol_type = other DNA
gaagatgcctgcccgccg

SEQ ID NO: 3557 - DNA, 18 bp, synthetic construct
  misc_feature 1..18: note = Synthetic
  source 1..18: mol_type = other DNA
agatgcctgcccgccggg

SEQ ID NO: 3558 - DNA, 18 bp, synthetic construct
  misc_feature 1..18: note = Synthetic
  source 1..18: mol_type = other DNA
atgcctgcccgccgggct

SEQ ID NO: 3559 - DNA, 18 bp, synthetic construct
  misc_feature 1..18: note = Synthetic
  source 1..18: mol_type = other DNA
gcctgcccgccgggcttc

SEQ ID NO: 3560 - DNA, 18 bp, synthetic construct
  misc_feature 1..18: note = Synthetic
  source 1..18: mol_type = other DNA
ctgcccgccgggcttcct

SEQ ID NO: 3561 - DNA, 18 bp, synthetic construct
  misc_feature 1..18: note = Synthetic
  source 1..18: mol_type = other DNA
gcccgccgggcttcctta

SEQ ID NO: 3562 - DNA, 18 bp, synthetic construct
  misc_feature 1..18: note = Synthetic
  source 1..18: mol_type = other DNA
ccgccgggcttccttatc

SEQ ID NO: 3563 - DNA, 18 bp, synthetic construct
  misc_feature 1..18: note = Synthetic
  source 1..18: mol_type = other DNA
gccgggcttccttatccc

SEQ ID NO: 3564 - DNA, 18 bp, synthetic construct
  misc_feature 1..18: note = Synthetic
  source 1..18: mol_type = other DNA
cgggcttccttatcccac

SEQ ID NO: 3565 - DNA, 18 bp, synthetic construct
  misc_feature 1..18: note = Synthetic
  source 1..18: mol_type = other DNA
ggcttccttatcccaccc

SEQ ID NO: 3566 - DNA, 18 bp, synthetic construct
  misc_feature 1..18: note = Synthetic
  source 1..18: mol_type = other DNA
cttccttatcccacccca

SEQ ID NO: 3567 - DNA, 18 bp, synthetic construct
  misc_feature 1..18: note = Synthetic
  source 1..18: mol_type = other DNA
tccttatcccaccccaga

SEQ ID NO: 3568 - DNA, 18 bp, synthetic construct
  misc_feature 1..18: note = Synthetic
  source 1..18: mol_type = other DNA
cttatcccaccccagaga

SEQ ID NO: 3569 - DNA, 18 bp, synthetic construct
  misc_feature 1..18: note = Synthetic
  source 1..18: mol_type = other DNA
tatcccaccccagagaca

SEQ ID NO: 3570 - DNA, 18 bp, synthetic construct
  misc_feature 1..18: note = Synthetic
  source 1..18: mol_type = other DNA
tcccaccccagagacatc

SEQ ID NO: 3571 - DNA, 18 bp, synthetic construct
  misc_feature 1..18: note = Synthetic
  source 1..18: mol_type = other DNA
ccaccccagagacatcgg

SEQ ID NO: 3572 - DNA, 18 bp, synthetic construct
  misc_feature 1..18: note = Synthetic
  source 1..18: mol_type = other DNA
accccagagacatcggct

SEQ ID NO: 3573 - DNA, 18 bp, synthetic construct
  misc_feature 1..18: note = Synthetic
  source 1..18: mol_type = other DNA
cccagagacatcggctgt

SEQ ID NO: 3574 - DNA, 18 bp, synthetic construct
  misc_feature 1..18: note = Synthetic
  source 1..18: mol_type = other DNA
cagagacatcggctgtga

SEQ ID NO: 3575 - DNA, 18 bp, synthetic construct
  misc_feature 1..18: note = Synthetic
  source 1..18: mol_type = other DNA
gagacatcggctgtgacc

SEQ ID NO: 3576 - DNA, 18 bp, synthetic construct
  misc_feature 1..18: note = Synthetic
  source 1..18: mol_type = other DNA
gacatcggctgtgaccag

SEQ ID NO: 3577 - DNA, 18 bp, synthetic construct
  misc_feature 1..18: note = Synthetic
  source 1..18: mol_type = other DNA
catcggctgtgaccagca

SEQ ID NO: 3578 - DNA, 18 bp, synthetic construct
  misc_feature 1..18: note = Synthetic
  source 1..18: mol_type = other DNA
tcggctgtgaccagcaca

SEQ ID NO: 3579 - DNA, 18 bp, synthetic construct
  misc_feature 1..18: note = Synthetic
  source 1..18: mol_type = other DNA
ggctgtgaccagcacacc

SEQ ID NO: 3580 - DNA, 18 bp, synthetic construct
  misc_feature 1..18: note = Synthetic
  source 1..18: mol_type = other DNA
ctgtgaccagcacaccag

SEQ ID NO: 3581 - DNA, 18 bp, synthetic construct
  misc_feature 1..18: note = Synthetic
  source 1..18: mol_type = other DNA
gtgaccagcacaccagct

SEQ ID NO: 3582 - DNA, 18 bp, synthetic construct
  misc_feature 1..18: note = Synthetic
  source 1..18: mol_type = other DNA
gaccagcacaccagctgc

SEQ ID NO: 3583 - DNA, 18 bp, synthetic construct
  misc_feature 1..18: note = Synthetic
  source 1..18: mol_type = other DNA
ccagcacaccagctgccc

SEQ ID NO: 3584 - DNA, 18 bp, synthetic construct
  misc_feature 1..18: note = Synthetic
  source 1..18: mol_type = other DNA
agcacaccagctgcccgg

SEQ ID NO: 3585 - DNA, 18 bp, synthetic construct
  misc_feature 1..18: note = Synthetic
  source 1..18: mol_type = other DNA
cacaccagctgcccggtg

SEQ ID NO: 3586 - DNA, 18 bp, synthetic construct
  misc_feature 1..18: note = Synthetic
  source 1..18: mol_type = other DNA
caccagctgcccggtggg

SEQ ID NO: 3587 - DNA, 18 bp, synthetic construct
  misc_feature 1..18: note = Synthetic
  source 1..18: mol_type = other DNA
ccagctgcccggtggggc

SEQ ID NO: 3588 - DNA, 18 bp, synthetic construct
  misc_feature 1..18: note = Synthetic
  source 1..18: mol_type = other DNA
agctgcccggtggggcag

SEQ ID NO: 3589 - DNA, 18 bp, synthetic construct
  misc_feature 1..18: note = Synthetic
  source 1..18: mol_type = other DNA
ctgcccggtggggcagac

SEQ ID NO: 3590 - DNA, 18 bp, synthetic construct
  misc_feature 1..18: note = Synthetic
  source 1..18: mol_type = other DNA
gcccggtggggcagacct

SEQ ID NO: 3591 - DNA, 18 bp, synthetic construct
  misc_feature 1..18: note = Synthetic
  source 1..18: mol_type = other DNA
ccggtggggcagacctgc

SEQ ID NO: 3592 - DNA, 18 bp, synthetic construct
  misc_feature 1..18: note = Synthetic
  source 1..18: mol_type = other DNA
ggtggggcagacctgctg

SEQ ID NO: 3593 - DNA, 18 bp, synthetic construct
  misc_feature 1..18: note = Synthetic
  source 1..18: mol_type = other DNA
tggggcagacctgctgcc

SEQ ID NO: 3594 - DNA, 18 bp, synthetic construct
  misc_feature 1..18: note = Synthetic
  source 1..18: mol_type = other DNA
gggcagacctgctgcccg

SEQ ID NO: 3595 - DNA, 18 bp, synthetic construct
  misc_feature 1..18: note = Synthetic
  source 1..18: mol_type = other DNA
gcagacctgctgcccgag

SEQ ID NO: 3596 - DNA, 18 bp, synthetic construct
  misc_feature 1..18: note = Synthetic
  source 1..18: mol_type = other DNA
agacctgctgcccgagcc

SEQ ID NO: 3597 - DNA, 18 bp, synthetic construct
  misc_feature 1..18: note = Synthetic
  source 1..18: mol_type = other DNA
acctgctgcccgagcctg

SEQ ID NO: 3598 - DNA, 18 bp, synthetic construct
  misc_feature 1..18: note = Synthetic
  source 1..18: mol_type = other DNA
ctgctgcccgagcctggg

SEQ ID NO: 3599 - DNA, 18 bp, synthetic construct
  misc_feature 1..18: note = Synthetic
  source 1..18: mol_type = other DNA
gctgcccgagcctgggtg

SEQ ID NO: 3600 - DNA, 18 bp, synthetic construct
  misc_feature 1..18: note = Synthetic
  source 1..18: mol_type = other DNA
tgcccgagcctgggtggg

SEQ ID NO: 3601 - DNA, 18 bp, synthetic construct
  misc_feature 1..18: note = Synthetic
  source 1..18: mol_type = other DNA
cccgagcctgggtgggag

SEQ ID NO: 3602 - DNA, 18 bp, synthetic construct
  misc_feature 1..18: note = Synthetic
  source 1..18: mol_type = other DNA
cgagcctgggtgggagct

SEQ ID NO: 3603 - DNA, 18 bp, synthetic construct
  misc_feature 1..18: note = Synthetic
  source 1..18: mol_type = other DNA
agcctgggtgggagctgg

SEQ ID NO: 3604 - DNA, 18 bp, synthetic construct
  misc_feature 1..18: note = Synthetic
  source 1..18: mol_type = other DNA
cctgggtgggagctgggc

SEQ ID NO: 3605 - DNA, 18 bp, synthetic construct
  misc_feature 1..18: note = Synthetic
  source 1..18: mol_type = other DNA
tgggtgggagctgggcct

SEQ ID NO: 3606 - DNA, 18 bp, synthetic construct
  misc_feature 1..18: note = Synthetic
  source 1..18: mol_type = other DNA
ggtgggagctgggcctgc

SEQ ID NO: 3607 - DNA, 18 bp, synthetic construct
  misc_feature 1..18: note = Synthetic
  source 1..18: mol_type = other DNA
tgggagctgggcctgctg

SEQ ID NO: 3608 - DNA, 18 bp, synthetic construct
  misc_feature 1..18: note = Synthetic
  source 1..18: mol_type = other DNA
ggagctgggcctgctgcc

SEQ ID NO: 3609 - DNA, 18 bp, synthetic construct
  misc_feature 1..18: note = Synthetic
  source 1..18: mol_type = other DNA
agctgggcctgctgccag

SEQ ID NO: 3610 - DNA, 18 bp, synthetic construct
  misc_feature 1..18: note = Synthetic
  source 1..18: mol_type = other DNA
ctgggcctgctgccagtt

SEQ ID NO: 3611 - DNA, 18 bp, synthetic construct
  misc_feature 1..18: note = Synthetic
  source 1..18: mol_type = other DNA
gggcctgctgccagttgc

SEQ ID NO: 3612 - DNA, 18 bp, synthetic construct
  misc_feature 1..18: note = Synthetic
  source 1..18: mol_type = other DNA
gcctgctgccagttgccc

SEQ ID NO: 3613 - DNA, 18 bp, synthetic construct
  misc_feature 1..18: note = Synthetic
  source 1..18: mol_type = other DNA
ctgctgccagttgcccca

SEQ ID NO: 3614 - DNA, 18 bp, synthetic construct
  misc_feature 1..18: note = Synthetic
  source 1..18: mol_type = other DNA
gctgccagttgccccatg

SEQ ID NO: 3615 - DNA, 18 bp, synthetic construct
  misc_feature 1..18: note = Synthetic
  source 1..18: mol_type = other DNA
tgccagttgccccatgtg

SEQ ID NO: 3616 - DNA, 18 bp, synthetic construct
  misc_feature 1..18: note = Synthetic
  source 1..18: mol_type = other DNA
ccagttgccccatgtgag

SEQ ID NO: 3617 - DNA, 18 bp, synthetic construct
  misc_feature 1..18: note = Synthetic
  source 1..18: mol_type = other DNA
agttgccccatgtgagtg

SEQ ID NO: 3618 - DNA, 18 bp, synthetic construct
  misc_feature 1..18: note = Synthetic
  source 1..18: mol_type = other DNA
ttgccccatgtgagtgcc

SEQ ID NO: 3619 - DNA, 18 bp, synthetic construct
  misc_feature 1..18: note = Synthetic
  source 1..18: mol_type = other DNA
gccccatgtgagtgcctc

SEQ ID NO: 3620 - DNA, 18 bp, synthetic construct
  misc_feature 1..18: note = Synthetic
  source 1..18: mol_type = other DNA
cccatgtgagtgcctccc

SEQ ID NO: 3621 - DNA, 18 bp, synthetic construct
  misc_feature 1..18: note = Synthetic
  source 1..18: mol_type = other DNA
catgtgagtgcctccctg

SEQ ID NO: 3622 - DNA, 18 bp, synthetic construct
  misc_feature 1..18: note = Synthetic
  source 1..18: mol_type = other DNA
tgtgagtgcctccctgcc

SEQ ID NO: 3623 - DNA, 18 bp, synthetic construct
  misc_feature 1..18: note = Synthetic
  source 1..18: mol_type = other DNA
tgagtgcctccctgcctg

SEQ ID NO: 3624 - DNA, 18 bp, synthetic construct
  misc_feature 1..18: note = Synthetic
  source 1..18: mol_type = other DNA
agtgcctccctgcctgcc

SEQ ID NO: 3625 - DNA, 18 bp, synthetic construct
  misc_feature 1..18: note = Synthetic
  source 1..18: mol_type = other DNA
tgcctccctgcctgcccc

SEQ ID NO: 3626 - DNA, 18 bp, synthetic construct
  misc_feature 1..18: note = Synthetic
  source 1..18: mol_type = other DNA
cctccctgcctgcccctg

SEQ ID NO: 3627 - DNA, 18 bp, synthetic construct
  misc_feature 1..18: note = Synthetic
  source 1..18: mol_type = other DNA
tccctgcctgcccctgga

SEQ ID NO: 3628 - DNA, 18 bp, synthetic construct
  misc_feature 1..18: note = Synthetic
  source 1..18: mol_type = other DNA
cctgcctgcccctggata

SEQ ID NO: 3629 - DNA, 18 bp, synthetic construct
  misc_feature 1..18: note = Synthetic
  source 1..18: mol_type = other DNA
tgcctgcccctggatagg

SEQ ID NO: 3630 - DNA, 18 bp, synthetic construct
  misc_feature 1..18: note = Synthetic
  source 1..18: mol_type = other DNA
cctgcccctggatagggg

SEQ ID NO: 3631 - DNA, 18 bp, synthetic construct
  misc_feature 1..18: note = Synthetic
  source 1..18: mol_type = other DNA
tgcccctggataggggag

SEQ ID NO: 3632 - DNA, 18 bp, synthetic construct
  misc_feature 1..18: note = Synthetic
  source 1..18: mol_type = other DNA
cccctggataggggagct

SEQ ID NO: 3633 - DNA, 18 bp, synthetic construct
  misc_feature 1..18: note = Synthetic
  source 1..18: mol_type = other DNA
cctggataggggagctaa

SEQ ID NO: 3634 - DNA, 18 bp, synthetic construct
  misc_feature 1..18: note = Synthetic
  source 1..18: mol_type = other DNA
tggataggggagctaagc

SEQ ID NO: 3635 - DNA, 18 bp, synthetic construct
  misc_feature 1..18: note = Synthetic
  source 1..18: mol_type = other DNA
gataggggagctaagccc

SEQ ID NO: 3636 - DNA, 18 bp, synthetic construct
  misc_feature 1..18: note = Synthetic
  source 1..18: mol_type = other DNA
taggggagctaagcccag

SEQ ID NO: 3637 - DNA, 18 bp, synthetic construct
  misc_feature 1..18: note = Synthetic
  source 1..18: mol_type = other DNA
ggggagctaagcccagtg

SEQ ID NO: 3638 - DNA, 18 bp, synthetic construct
  misc_feature 1..18: note = Synthetic
  source 1..18: mol_type = other DNA
ggagctaagcccagtgag

SEQ ID NO: 3639 - DNA, 18 bp, synthetic construct
  misc_feature 1..18: note = Synthetic
  source 1..18: mol_type = other DNA
agctaagcccagtgaggg

SEQ ID NO: 3640 - DNA, 18 bp, synthetic construct
  misc_feature 1..18: note = Synthetic
  source 1..18: mol_type = other DNA
cagtgaggggacaggaac

SEQ ID NO: 3641 - DNA, 18 bp, synthetic construct
  misc_feature 1..18: note = Synthetic
  source 1..18: mol_type = other DNA
gtgaggggacaggaacat

SEQ ID NO: 3642 - DNA, 18 bp, synthetic construct
  misc_feature 1..18: note = Synthetic
  source 1..18: mol_type = other DNA
gaggggacaggaacataa

SEQ ID NO: 3643 - DNA, 18 bp, synthetic construct
  misc_feature 1..18: note = Synthetic
  source 1..18: mol_type = other DNA
ggggacaggaacataatg

SEQ ID NO: 3644 - DNA, 18 bp, synthetic construct
  misc_feature 1..18: note = Synthetic
  source 1..18: mol_type = other DNA
ggacaggaacataatgcc

SEQ ID NO: 3645 - DNA, 18 bp, synthetic construct
  misc_feature 1..18: note = Synthetic
  source 1..18: mol_type = other DNA
acaggaacataatgccat

SEQ ID NO: 3646 - DNA, 18 bp, synthetic construct
  misc_feature 1..18: note = Synthetic
  source 1..18: mol_type = other DNA
aggaacataatgccattc

SEQ ID NO: 3647 - DNA, 18 bp, synthetic construct
  misc_feature 1..18: note = Synthetic
  source 1..18: mol_type = other DNA
gaacataatgccattctg

SEQ ID NO: 3648 - DNA, 18 bp, synthetic construct
  misc_feature 1..18: note = Synthetic
  source 1..18: mol_type = other DNA
acataatgccattctgtg

SEQ ID NO: 3649 - DNA, 18 bp, synthetic construct
  misc_feature 1..18: note = Synthetic
  source 1..18: mol_type = other DNA
ataatgccattctgtgct

SEQ ID NO: 3650 - DNA, 18 bp, synthetic construct
  misc_feature 1..18: note = Synthetic
  source 1..18: mol_type = other DNA
aatgccattctgtgctcc

SEQ ID NO: 3651 - DNA, 18 bp, synthetic construct
  misc_feature 1..18: note = Synthetic
  source 1..18: mol_type = other DNA
tgccattctgtgctccct

SEQ ID NO: 3652 - DNA, 18 bp, synthetic construct
  misc_feature 1..18: note = Synthetic
  source 1..18: mol_type = other DNA
ccattctgtgctcccttc

SEQ ID NO: 3653 - DNA, 18 bp, synthetic construct
  misc_feature 1..18: note = Synthetic
  source 1..18: mol_type = other DNA
attctgtgctcccttccc

SEQ ID NO: 3654 - DNA, 18 bp, synthetic construct
  misc_feature 1..18: note = Synthetic
  source 1..18: mol_type = other DNA
tctgtgctcccttccccg

SEQ ID NO: 3655 - DNA, 18 bp, synthetic construct
  misc_feature 1..18: note = Synthetic
  source 1..18: mol_type = other DNA
tgtgctcccttccccgcc

SEQ ID NO: 3656 - DNA, 18 bp, synthetic construct
  misc_feature 1..18: note = Synthetic
  source 1..18: mol_type = other DNA
tgctcccttccccgccag

SEQ ID NO: 3657 - DNA, 18 bp, synthetic construct
  misc_feature 1..18: note = Synthetic
  source 1..18: mol_type = other DNA
ctcccttccccgccaggc

SEQ ID NO: 3658 - DNA, 18 bp, synthetic construct
  misc_feature 1..18: note = Synthetic
  source 1..18: mol_type = other DNA
cccttccccgccaggctg

SEQ ID NO: 3659 - DNA, 18 bp, synthetic construct
  misc_feature 1..18: note = Synthetic
  source 1..18: mol_type = other DNA
cttccccgccaggctgtg

SEQ ID NO: 3660 - DNA, 18 bp, synthetic construct
  misc_feature 1..18: note = Synthetic
  source 1..18: mol_type = other DNA
tccccgccaggctgtgtg

SEQ ID NO: 3661 - DNA, 18 bp, synthetic construct
  misc_feature 1..18: note = Synthetic
  source 1..18: mol_type = other DNA
cccgccaggctgtgtgct

SEQ ID NO: 3662 - DNA, 18 bp, synthetic construct
  misc_feature 1..18: note = Synthetic
  source 1..18: mol_type = other DNA
cgccaggctgtgtgctgc

SEQ ID NO: 3663 - DNA, 18 bp, synthetic construct
  misc_feature 1..18: note = Synthetic
  source 1..18: mol_type = other DNA
ccaggctgtgtgctgcga

SEQ ID NO: 3664 - DNA, 18 bp, synthetic construct
  misc_feature 1..18: note = Synthetic
  source 1..18: mol_type = other DNA
aggctgtgtgctgcgagg

SEQ ID NO: 3665 - DNA, 18 bp, synthetic construct
  misc_feature 1..18: note = Synthetic
  source 1..18: mol_type = other DNA
gctgtgtgctgcgaggat

SEQ ID NO: 3666 - DNA, 18 bp, synthetic construct
  misc_feature 1..18: note = Synthetic
  source 1..18: mol_type = other DNA
tgtgtgctgcgaggatcg

SEQ ID NO: 3667 - DNA, 18 bp, synthetic construct
  misc_feature 1..18: note = Synthetic
  source 1..18: mol_type = other DNA
tgtgctgcgaggatcgcc

SEQ ID NO: 3668 - DNA, 18 bp, synthetic construct
  misc_feature 1..18: note = Synthetic
  source 1..18: mol_type = other DNA
tgctgcgaggatcgccag

SEQ ID NO: 3669 - DNA, 18 bp, synthetic construct
  misc_feature 1..18: note = Synthetic
  source 1..18: mol_type = other DNA
ctgcgaggatcgccagca

SEQ ID NO: 3670 - DNA, 18 bp, synthetic construct
  misc_feature 1..18: note = Synthetic
  source 1..18: mol_type = other DNA
gcgaggatcgccagcact

SEQ ID NO: 3671 - DNA, 18 bp, synthetic construct
  misc_feature 1..18: note = Synthetic
  source 1..18: mol_type = other DNA
gaggatcgccagcactgc

SEQ ID NO: 3672 - DNA, 18 bp, synthetic construct
  misc_feature 1..18: note = Synthetic
  source 1..18: mol_type = other DNA
ggatcgccagcactgctg

SEQ ID NO: 3673 - DNA, 18 bp, synthetic construct
  misc_feature 1..18: note = Synthetic
  source 1..18: mol_type = other DNA
atcgccagcactgctgcc

SEQ ID NO: 3674 - DNA, 18 bp, synthetic construct
  misc_feature 1..18: note = Synthetic
  source 1..18: mol_type = other DNA
cgccagcactgctgcccg

SEQ ID NO: 3675 - DNA, 18 bp, synthetic construct
  misc_feature 1..18: note = Synthetic
  source 1..18: mol_type = other DNA
ccagcactgctgcccggc

SEQ ID NO: 3676 - DNA, 18 bp, synthetic construct
  misc_feature 1..18: note = Synthetic
  source 1..18: mol_type = other DNA
agcactgctgcccggctg

SEQ ID NO: 3677 - DNA, 18 bp, synthetic construct
  misc_feature 1..18: note = Synthetic
  source 1..18: mol_type = other DNA
cactgctgcccggctggc

SEQ ID NO: 3678 - DNA, 18 bp, synthetic construct
  misc_feature 1..18: note = Synthetic
  source 1..18: mol_type = other DNA
ctgctgcccggctggcta

SEQ ID NO: 3679 - DNA, 18 bp, synthetic construct
  misc_feature 1..18: note = Synthetic
  source 1..18: mol_type = other DNA
gctgcccggctggctaca

SEQ ID NO: 3680 - DNA, 18 bp, synthetic construct
  misc_feature 1..18: note = Synthetic
  source 1..18: mol_type = other DNA
tgcccggctggctacacc

SEQ ID NO: 3681 - DNA, 18 bp, synthetic construct
  misc_feature 1..18: note = Synthetic
  source 1..18: mol_type = other DNA
cccggctggctacacctg

SEQ ID NO: 3682 - DNA, 18 bp, synthetic construct
  misc_feature 1..18: note = Synthetic
  source 1..18: mol_type = other DNA
cggctggctacacctgca

SEQ ID NO: 3683 - DNA, 18 bp, synthetic construct
  misc_feature 1..18: note = Synthetic
  source 1..18: mol_type = other DNA
gctggctacacctgcaac

SEQ ID NO: 3684 - DNA, 18 bp, synthetic construct
  misc_feature 1..18: note = Synthetic
  source 1..18: mol_type = other DNA
tggctacacctgcaacgt

SEQ ID NO: 3685 - DNA, 18 bp, synthetic construct
  misc_feature 1..18: note = Synthetic
  source 1..18: mol_type = other DNA
gctacacctgcaacgtga

SEQ ID NO: 3686 - DNA, 18 bp, synthetic construct
  misc_feature 1..18: note = Synthetic
  source 1..18: mol_type = other DNA
tacacctgcaacgtgaag

SEQ ID NO: 3687 - DNA, 18 bp, synthetic construct
  misc_feature 1..18: note = Synthetic
  source 1..18: mol_type = other DNA
cacctgcaacgtgaaggc

SEQ ID NO: 3688 - DNA, 18 bp, synthetic construct
  misc_feature 1..18: note = Synthetic
  source 1..18: mol_type = other DNA
cctgcaacgtgaaggctc

SEQ ID NO: 3689 - DNA, 18 bp, synthetic construct
  misc_feature 1..18: note = Synthetic
  source 1..18: mol_type = other DNA
tgcaacgtgaaggctcga

SEQ ID NO: 3690 - DNA, 18 bp, synthetic construct
  misc_feature 1..18: note = Synthetic
  source 1..18: mol_type = other DNA
caacgtgaaggctcgatc

SEQ ID NO: 3691 - DNA, 18 bp, synthetic construct
  misc_feature 1..18: note = Synthetic
  source 1..18: mol_type = other DNA
acgtgaaggctcgatcct

SEQ ID NO: 3692 - DNA, 18 bp, synthetic construct
  misc_feature 1..18: note = Synthetic
  source 1..18: mol_type = other DNA
gtgaaggctcgatcctgc

SEQ ID NO: 3693 - DNA, 18 bp, synthetic construct
  misc_feature 1..18: note = Synthetic
  source 1..18: mol_type = other DNA
gaaggctcgatcctgcga

SEQ ID NO: 3694 - DNA, 18 bp, synthetic construct
  misc_feature 1..18: note = Synthetic
  source 1..18: mol_type = other DNA
aggctcgatcctgcgaga

SEQ ID NO: 3695 - DNA, 18 bp, synthetic construct
  misc_feature 1..18: note = Synthetic
  source 1..18: mol_type = other DNA
gctcgatcctgcgagaag

SEQ ID NO: 3696 - DNA, 18 bp, synthetic construct
  misc_feature 1..18: note = Synthetic
  source 1..18: mol_type = other DNA
tcgatcctgcgagaagga

SEQ ID NO: 3697 - DNA, 18 bp, synthetic construct
  misc_feature 1..18: note = Synthetic
  source 1..18: mol_type = other DNA
gatcctgcgagaaggaag

SEQ ID NO: 3698 - DNA, 18 bp, synthetic construct
  misc_feature 1..18: note = Synthetic
  source 1..18: mol_type = other DNA
tcctgcgagaaggaagtg

SEQ ID NO: 3699 - DNA, 18 bp, synthetic construct
  misc_feature 1..18: note = Synthetic
  source 1..18: mol_type = other DNA
ctgcgagaaggaagtggt

SEQ ID NO: 3700 - DNA, 18 bp, synthetic construct
  misc_feature 1..18: note = Synthetic
  source 1..18: mol_type = other DNA
gcgagaaggaagtggtct

SEQ ID NO: 3701 - DNA, 18 bp, synthetic construct
  misc_feature 1..18: note = Synthetic
  source 1..18: mol_type = other DNA
gagaaggaagtggtctct

SEQ ID NO: 3702 - DNA, 18 bp, synthetic construct
  misc_feature 1..18: note = Synthetic
  source 1..18: mol_type = other DNA
gaaggaagtggtctctgc

SEQ ID NO: 3703 - DNA, 18 bp, synthetic construct
  misc_feature 1..18: note = Synthetic
  source 1..18: mol_type = other DNA
aggaagtggtctctgccc

SEQ ID NO: 3704 - DNA, 18 bp, synthetic construct
  misc_feature 1..18: note = Synthetic
  source 1..18: mol_type = other DNA
gaagtggtctctgcccag

SEQ ID NO: 3705 - DNA, 18 bp, synthetic construct
  misc_feature 1..18: note = Synthetic
  source 1..18: mol_type = other DNA
agtggtctctgcccagcc

SEQ ID NO: 3706 - DNA, 18 bp, synthetic construct
  misc_feature 1..18: note = Synthetic
  source 1..18: mol_type = other DNA
tggtctctgcccagcctg

SEQ ID NO: 3707 - DNA, 18 bp, synthetic construct
  misc_feature 1..18: note = Synthetic
  source 1..18: mol_type = other DNA
gtctctgcccagcctgcc

SEQ ID NO: 3708 - DNA, 18 bp, synthetic construct
  misc_feature 1..18: note = Synthetic
  source 1..18: mol_type = other DNA
ctctgcccagcctgccac

SEQ ID NO: 3709 - DNA, 18 bp, synthetic construct
  misc_feature 1..18: note = Synthetic
  source 1..18: mol_type = other DNA
ctgcccagcctgccacct

SEQ ID NO: 3710 - DNA, 18 bp, synthetic construct
  misc_feature 1..18: note = Synthetic
  source 1..18: mol_type = other DNA
gcccagcctgccaccttc

SEQ ID NO: 3711 - DNA, 18 bp, synthetic construct
  misc_feature 1..18: note = Synthetic
  source 1..18: mol_type = other DNA
ccagcctgccaccttcct

SEQ ID NO: 3712 - DNA, 18 bp, synthetic construct
  misc_feature 1..18: note = Synthetic
  source 1..18: mol_type = other DNA
agcctgccaccttcctgg

SEQ ID NO: 3713 - DNA, 18 bp, synthetic construct
  misc_feature 1..18: note = Synthetic
  source 1..18: mol_type = other DNA
cctgccaccttcctggcc

SEQ ID NO: 3714 - DNA, 18 bp, synthetic construct
  misc_feature 1..18: note = Synthetic
  source 1..18: mol_type = other DNA
tgccaccttcctggcccg

SEQ ID NO: 3715 - DNA, 18 bp, synthetic construct
  misc_feature 1..18: note = Synthetic
  source 1..18: mol_type = other DNA
ccaccttcctggcccgta

SEQ ID NO: 3716 - DNA, 18 bp, synthetic construct
  misc_feature 1..18: note = Synthetic
  source 1..18: mol_type = other DNA
accttcctggcccgtagc

SEQ ID NO: 3717 - DNA, 18 bp, synthetic construct
  misc_feature 1..18: note = Synthetic
  source 1..18: mol_type = other DNA
cttcctggcccgtagccc

SEQ ID NO: 3718 - DNA, 18 bp, synthetic construct
  misc_feature 1..18: note = Synthetic
  source 1..18: mol_type = other DNA
tcctggcccgtagccctc

SEQ ID NO: 3719 - DNA, 18 bp, synthetic construct
  misc_feature 1..18: note = Synthetic
  source 1..18: mol_type = other DNA
ctggcccgtagccctcac

SEQ ID NO: 3720 - DNA, 18 bp, synthetic construct
  misc_feature 1..18: note = Synthetic
  source 1..18: mol_type = other DNA
ggcccgtagccctcacgt

SEQ ID NO: 3721 - DNA, 18 bp, synthetic construct
  misc_feature 1..18: note = Synthetic
  source 1..18: mol_type = other DNA
cccgtagccctcacgtgg

SEQ ID NO: 3722 - DNA, 18 bp, synthetic construct
  misc_feature 1..18: note = Synthetic
  source 1..18: mol_type = other DNA
cgtagccctcacgtgggt

SEQ ID NO: 3723 - DNA, 18 bp, synthetic construct
  misc_feature 1..18: note = Synthetic
  source 1..18: mol_type = other DNA
tagccctcacgtgggtgt

SEQ ID NO: 3724 - DNA, 18 bp, synthetic construct
  misc_feature 1..18: note = Synthetic
  source 1..18: mol_type = other DNA
gccctcacgtgggtgtga

SEQ ID NO: 3725 - DNA, 18 bp, synthetic construct
  misc_feature 1..18: note = Synthetic
  source 1..18: mol_type = other DNA
cctcacgtgggtgtgaag

SEQ ID NO: 3726 - DNA, 18 bp, synthetic construct
  misc_feature 1..18: note = Synthetic
  source 1..18: mol_type = other DNA
tcacgtgggtgtgaagga

SEQ ID NO: 3727 - DNA, 18 bp, synthetic construct
  misc_feature 1..18: note = Synthetic
  source 1..18: mol_type = other DNA
acgtgggtgtgaaggacg

SEQ ID NO: 3728 - DNA, 18 bp, synthetic construct
  misc_feature 1..18: note = Synthetic
  source 1..18: mol_type = other DNA
gtgggtgtgaaggacgtg

SEQ ID NO: 3729 - DNA, 18 bp, synthetic construct
  misc_feature 1..18: note = Synthetic
  source 1..18: mol_type = other DNA
gggtgtgaaggacgtgga

SEQ ID NO: 3730 - DNA, 18 bp, synthetic construct
  misc_feature 1..18: note = Synthetic
  source 1..18: mol_type = other DNA
gtgtgaaggacgtggagt

SEQ ID NO: 3731 - DNA, 18 bp, synthetic construct
  misc_feature 1..18: note = Synthetic
  source 1..18: mol_type = other DNA
gtgaaggacgtggagtgt

SEQ ID NO: 3732 - DNA, 18 bp, synthetic construct
  misc_feature 1..18: note = Synthetic
  source 1..18: mol_type = other DNA
gaaggacgtggagtgtgg

SEQ ID NO: 3733 - DNA, 18 bp, synthetic construct
  misc_feature 1..18: note = Synthetic
  source 1..18: mol_type = other DNA
aggacgtggagtgtgggg

SEQ ID NO: 3734 - DNA, 18 bp, synthetic construct
  misc_feature 1..18: note = Synthetic
  source 1..18: mol_type = other DNA
gacgtggagtgtggggaa

SEQ ID NO: 3735 - DNA, 18 bp, synthetic construct
  misc_feature 1..18: note = Synthetic
  source 1..18: mol_type = other DNA
cgtggagtgtggggaagg

SEQ ID NO: 3736 - DNA, 18 bp, synthetic construct
  misc_feature 1..18: note = Synthetic
  source 1..18: mol_type = other DNA
tggagtgtggggaaggac

SEQ ID NO: 3737 - DNA, 18 bp, synthetic construct
  misc_feature 1..18: note = Synthetic
  source 1..18: mol_type = other DNA
gagtgtggggaaggacac

SEQ ID NO: 3738 - DNA, 18 bp, synthetic construct
  misc_feature 1..18: note = Synthetic
  source 1..18: mol_type = other DNA
gtgtggggaaggacactt

SEQ ID NO: 3739 - DNA, 18 bp, synthetic construct
  misc_feature 1..18: note = Synthetic
  source 1..18: mol_type = other DNA
gtggggaaggacacttct

SEQ ID NO: 3740 - DNA, 18 bp, synthetic construct
  misc_feature 1..18: note = Synthetic
  source 1..18: mol_type = other DNA
ggggaaggacacttctgc

SEQ ID NO: 3741 - DNA, 18 bp, synthetic construct
  misc_feature 1..18: note = Synthetic
  source 1..18: mol_type = other DNA
ggaaggacacttctgcca

SEQ ID NO: 3742 - DNA, 18 bp, synthetic construct
  misc_feature 1..18: note = Synthetic
  source 1..18: mol_type = other DNA
aaggacacttctgccatg

SEQ ID NO: 3743 - DNA, 18 bp, synthetic construct
  misc_feature 1..18: note = Synthetic
  source 1..18: mol_type = other DNA
ggacacttctgccatgat

SEQ ID NO: 3744 - DNA, 18 bp, synthetic construct
  misc_feature 1..18: note = Synthetic
  source 1..18: mol_type = other DNA
acacttctgccatgataa

SEQ ID NO: 3745 - DNA, 18 bp, synthetic construct
  misc_feature 1..18: note = Synthetic
  source 1..18: mol_type = other DNA
acttctgccatgataacc

SEQ ID NO: 3746 - DNA, 18 bp, synthetic construct
  misc_feature 1..18: note = Synthetic
  source 1..18: mol_type = other DNA
ttctgccatgataaccag

SEQ ID NO: 3747 - DNA, 18 bp, synthetic construct
  misc_feature 1..18: note = Synthetic
  source 1..18: mol_type = other DNA
ctgccatgataaccagac

SEQ ID NO: 3748 - DNA, 18 bp, synthetic construct
  misc_feature 1..18: note = Synthetic
  source 1..18: mol_type = other DNA
gccatgataaccagacct

SEQ ID NO: 3749 - DNA, 18 bp, synthetic construct
  misc_feature 1..18: note = Synthetic
  source 1..18: mol_type = other DNA
catgataaccagacctgc

SEQ ID NO: 3750 - DNA, 18 bp, synthetic construct
  misc_feature 1..18: note = Synthetic
  source 1..18: mol_type = other DNA
tgataaccagacctgctg

SEQ ID NO: 3751 - DNA, 18 bp, synthetic construct
  misc_feature 1..18: note = Synthetic
  source 1..18: mol_type = other DNA
ataaccagacctgctgcc

SEQ ID NO: 3752 - DNA, 18 bp, synthetic construct
  misc_feature 1..18: note = Synthetic
  source 1..18: mol_type = other DNA
aaccagacctgctgccga

SEQ ID NO: 3753 - DNA, 18 bp, synthetic construct
  misc_feature 1..18: note = Synthetic
  source 1..18: mol_type = other DNA
ccagacctgctgccgaga

SEQ ID NO: 3754 - DNA, 18 bp, synthetic construct
  misc_feature 1..18: note = Synthetic
  source 1..18: mol_type = other DNA
agacctgctgccgagaca

SEQ ID NO: 3755 - DNA, 18 bp, synthetic construct
  misc_feature 1..18: note = Synthetic
  source 1..18: mol_type = other DNA
acctgctgccgagacaac

SEQ ID NO: 3756 - DNA, 18 bp, synthetic construct
  misc_feature 1..18: note = Synthetic
  source 1..18: mol_type = other DNA
ctgctgccgagacaaccg

SEQ ID NO: 3757 - DNA, 18 bp, synthetic construct
  misc_feature 1..18: note = Synthetic
  source 1..18: mol_type = other DNA
gctgccgagacaaccgac

SEQ ID NO: 3758 - DNA, 18 bp, synthetic construct
  misc_feature 1..18: note = Synthetic
  source 1..18: mol_type = other DNA
tgccgagacaaccgacag

SEQ ID NO: 3759 - DNA, 18 bp, synthetic construct
  misc_feature 1..18: note = Synthetic
  source 1..18: mol_type = other DNA
ccgagacaaccgacaggg

SEQ ID NO: 3760 - DNA, 18 bp, synthetic construct
  misc_feature 1..18: note = Synthetic
  source 1..18: mol_type = other DNA
gagacaaccgacagggct

SEQ ID NO: 3761 - DNA, 18 bp, synthetic construct
  misc_feature 1..18: note = Synthetic
  source 1..18: mol_type = other DNA
gacaaccgacagggctgg

SEQ ID NO: 3762 - DNA, 18 bp, synthetic construct
  misc_feature 1..18: note = Synthetic
  source 1..18: mol_type = other DNA
caaccgacagggctgggc

SEQ ID NO: 3763 - DNA, 18 bp, synthetic construct
  misc_feature 1..18: note = Synthetic
  source 1..18: mol_type = other DNA
accgacagggctgggcct

SEQ ID NO: 3764 - DNA, 18 bp, synthetic construct
  misc_feature 1..18: note = Synthetic
  source 1..18: mol_type = other DNA
cgacagggctgggcctgc

SEQ ID NO: 3765 - DNA, 18 bp, synthetic construct
  misc_feature 1..18: note = Synthetic
  source 1..18: mol_type = other DNA
acagggctgggcctgctg

SEQ ID NO: 3766 - DNA, 18 bp, synthetic construct
  misc_feature 1..18: note = Synthetic
  source 1..18: mol_type = other DNA
agggctgggcctgctgtc

SEQ ID NO: 3767 - DNA, 18 bp, synthetic construct
  misc_feature 1..18: note = Synthetic
  source 1..18: mol_type = other DNA
ggctgggcctgctgtccc

SEQ ID NO: 3768 - DNA, 18 bp, synthetic construct
  misc_feature 1..18: note = Synthetic
  source 1..18: mol_type = other DNA
ctgggcctgctgtcccta

SEQ ID NO: 3769 - DNA, 18 bp, synthetic construct
  misc_feature 1..18: note = Synthetic
  source 1..18: mol_type = other DNA
gggcctgctgtccctacc

SEQ ID NO: 3770 - DNA, 18 bp, synthetic construct
  misc_feature 1..18: note = Synthetic
  source 1..18: mol_type = other DNA
gcctgctgtccctaccgc

SEQ ID NO: 3771 - DNA, 18 bp, synthetic construct
  misc_feature 1..18: note = Synthetic
  source 1..18: mol_type = other DNA
ctgctgtccctaccgcca

SEQ ID NO: 3772 - DNA, 18 bp, synthetic construct
  misc_feature 1..18: note = Synthetic
  source 1..18: mol_type = other DNA
gtcagtgccaacccccat

SEQ ID NO: 3773 - DNA, 18 bp, synthetic construct
  misc_feature 1..18: note = Synthetic
  source 1..18: mol_type = other DNA
cagtgccaacccccatcc

SEQ ID NO: 3774 - DNA, 18 bp, synthetic construct
  misc_feature 1..18: note = Synthetic
  source 1..18: mol_type = other DNA
gtgccaacccccatcctg

SEQ ID NO: 3775 - DNA, 18 bp, synthetic construct
  misc_feature 1..18: note = Synthetic
  source 1..18: mol_type = other DNA
gccaacccccatcctggg

SEQ ID NO: 3776 - DNA, 18 bp, synthetic construct
  misc_feature 1..18: note = Synthetic
  source 1..18: mol_type = other DNA
caacccccatcctggggc

SEQ ID NO: 3777 - DNA, 18 bp, synthetic construct
  misc_feature 1..18: note = Synthetic
  source 1..18: mol_type = other DNA
acccccatcctggggctg

SEQ ID NO: 3778 - DNA, 18 bp, synthetic construct
  misc_feature 1..18: note = Synthetic
  source 1..18: mol_type = other DNA
ccccatcctggggctggg

SEQ ID NO: 3779 - DNA, 18 bp, synthetic construct
  misc_feature 1..18: note = Synthetic
  source 1..18: mol_type = other DNA
ccatcctggggctgggta

SEQ ID NO: 3780 - DNA, 18 bp, synthetic construct
  misc_feature 1..18: note = Synthetic
  source 1..18: mol_type = other DNA
atcctggggctgggtatg

SEQ ID NO: 3781 - DNA, 18 bp, synthetic construct
  misc_feature 1..18: note = Synthetic
  source 1..18: mol_type = other DNA
cctggggctgggtatggc

SEQ ID NO: 3782 - DNA, 18 bp, synthetic construct
  misc_feature 1..18: note = Synthetic
  source 1..18: mol_type = other DNA
tggggctgggtatggcca

SEQ ID NO: 3783 - DNA, 18 bp, synthetic construct
  misc_feature 1..18: note = Synthetic
  source 1..18: mol_type = other DNA
gggctgggtatggccagg

SEQ ID NO: 3784 - DNA, 18 bp, synthetic construct
  misc_feature 1..18: note = Synthetic
  source 1..18: mol_type = other DNA
gctgggtatggccaggga

SEQ ID NO: 3785 - DNA, 18 bp, synthetic construct
  misc_feature 1..18: note = Synthetic
  source 1..18: mol_type = other DNA
tgggtatggccagggacc

SEQ ID NO: 3786 - DNA, 18 bp, synthetic construct
  misc_feature 1..18: note = Synthetic
  source 1..18: mol_type = other DNA
ggtatggccagggaccag

SEQ ID NO: 3787 - DNA, 18 bp, synthetic construct
  misc_feature 1..18: note = Synthetic
  source 1..18: mol_type = other DNA
tatggccagggaccaggt

SEQ ID NO: 3788 - DNA, 18 bp, synthetic construct
  misc_feature 1..18: note = Synthetic
  source 1..18: mol_type = other DNA
tggccagggaccaggtcc

SEQ ID NO: 3789 - DNA, 18 bp, synthetic construct
  misc_feature 1..18: note = Synthetic
  source 1..18: mol_type = other DNA
gggaccaggtcccacctc

SEQ ID NO: 3790 - DNA, 18 bp, synthetic construct
  misc_feature 1..18: note = Synthetic
  source 1..18: mol_type = other DNA
gaccaggtcccacctcgt

SEQ ID NO: 3791 - DNA, 18 bp, synthetic construct
  misc_feature 1..18: note = Synthetic
  source 1..18: mol_type = other DNA
ccaggtcccacctcgtcc

SEQ ID NO: 3792 - DNA, 18 bp, synthetic construct
  misc_feature 1..18: note = Synthetic
  source 1..18: mol_type = other DNA
aggtcccacctcgtccaa

SEQ ID NO: 3793 - DNA, 18 bp, synthetic construct
  misc_feature 1..18: note = Synthetic
  source 1..18: mol_type = other DNA
gtcccacctcgtccaacc

SEQ ID NO: 3794 - DNA, 18 bp, synthetic construct
  misc_feature 1..18: note = Synthetic
  source 1..18: mol_type = other DNA
cccacctcgtccaaccct

SEQ ID NO: 3795 - DNA, 18 bp, synthetic construct
  misc_feature 1..18: note = Synthetic
  source 1..18: mol_type = other DNA
cacctcgtccaaccctct

SEQ ID NO: 3796 - DNA, 18 bp, synthetic construct
  misc_feature 1..18: note = Synthetic
  source 1..18: mol_type = other DNA
cctcgtccaaccctctcg

SEQ ID NO: 3797 - DNA, 18 bp, synthetic construct
  misc_feature 1..18: note = Synthetic
  source 1..18: mol_type = other DNA
tcgtccaaccctctcgcc

SEQ ID NO: 3798 - DNA, 18 bp, synthetic construct
  misc_feature 1..18: note = Synthetic
  source 1..18: mol_type = other DNA
gtccaaccctctcgcccc

SEQ ID NO: 3799 - DNA, 18 bp, synthetic construct
  misc_feature 1..18: note = Synthetic
  source 1..18: mol_type = other DNA
ccaaccctctcgcccccc

SEQ ID NO: 3800 - DNA, 18 bp, synthetic construct
  misc_feature 1..18: note = Synthetic
  source 1..18: mol_type = other DNA
aaccctctcgcccccctc

SEQ ID NO: 3801 - DNA, 18 bp, synthetic construct
  misc_feature 1..18: note = Synthetic
  source 1..18: mol_type = other DNA
ccctctcgcccccctctg

SEQ ID NO: 3802 - DNA, 18 bp, synthetic construct
  misc_feature 1..18: note = Synthetic
  source 1..18: mol_type = other DNA
ctctcgcccccctctgac

SEQ ID NO: 3803 - DNA, 18 bp, synthetic construct
  misc_feature 1..18: note = Synthetic
  source 1..18: mol_type = other DNA
ctcgcccccctctgacca

SEQ ID NO: 3804 - DNA, 18 bp, synthetic construct
  misc_feature 1..18: note = Synthetic
  source 1..18: mol_type = other DNA
cgcccccctctgaccatc

SEQ ID NO: 3805 - DNA, 18 bp, synthetic construct
  misc_feature 1..18: note = Synthetic
  source 1..18: mol_type = other DNA
cccccctctgaccatcca

SEQ ID NO: 3806 - DNA, 18 bp, synthetic construct
  misc_feature 1..18: note = Synthetic
  source 1..18: mol_type = other DNA
ggcgtctgttgtgctgat

SEQ ID NO: 3807 - DNA, 18 bp, synthetic construct
  misc_feature 1..18: note = Synthetic
  source 1..18: mol_type = other DNA
cgtctgttgtgctgatcg

SEQ ID NO: 3808 - DNA, 18 bp, synthetic construct
  misc_feature 1..18: note = Synthetic
  source 1..18: mol_type = other DNA
tctgttgtgctgatcggc

SEQ ID NO: 3809 - DNA, 18 bp, synthetic construct
  misc_feature 1..18: note = Synthetic
  source 1..18: mol_type = other DNA
tgttgtgctgatcggcgc

SEQ ID NO: 3810 - DNA, 18 bp, synthetic construct
  misc_feature 1..18: note = Synthetic
  source 1..18: mol_type = other DNA
ttgtgctgatcggcgcca

SEQ ID NO: 3811 - DNA, 18 bp, synthetic construct
  misc_feature 1..18: note = Synthetic
  source 1..18: mol_type = other DNA
gtgctgatcggcgccact

SEQ ID NO: 3812 - DNA, 18 bp, synthetic construct
  misc_feature 1..18: note = Synthetic
  source 1..18: mol_type = other DNA
gctgatcggcgccactgc

SEQ ID NO: 3813 - DNA, 18 bp, synthetic construct
  misc_feature 1..18: note = Synthetic
  source 1..18: mol_type = other DNA
tgatcggcgccactgctg

SEQ ID NO: 3814 - DNA, 18 bp, synthetic construct
  misc_feature 1..18: note = Synthetic
  source 1..18: mol_type = other DNA
atcggcgccactgctgtc

SEQ ID NO: 3815 - DNA, 18 bp, synthetic construct
  misc_feature 1..18: note = Synthetic
  source 1..18: mol_type = other DNA
cggcgccactgctgtcct

SEQ ID NO: 3816 - DNA, 18 bp, synthetic construct
  misc_feature 1..18: note = Synthetic
  source 1..18: mol_type = other DNA
gcgccactgctgtcctgc

SEQ ID NO: 3817 - DNA, 18 bp, synthetic construct
  misc_feature 1..18: note = Synthetic
  source 1..18: mol_type = other DNA
gccactgctgtcctgctg

SEQ ID NO: 3818 - DNA, 18 bp, synthetic construct
  misc_feature 1..18: note = Synthetic
  source 1..18: mol_type = other DNA
cactgctgtcctgctggc

SEQ ID NO: 3819 - DNA, 18 bp, synthetic construct
  misc_feature 1..18: note = Synthetic
  source 1..18: mol_type = other DNA
ctgctgtcctgctggctt

SEQ ID NO: 3820 - DNA, 18 bp, synthetic construct
  misc_feature 1..18: note = Synthetic
  source 1..18: mol_type = other DNA
gctgtcctgctggcttcc

SEQ ID NO: 3821 - DNA, 18 bp, synthetic construct
  misc_feature 1..18: note = Synthetic
  source 1..18: mol_type = other DNA
tgtcctgctggcttccgc

SEQ ID NO: 3822 - DNA, 18 bp, synthetic construct
  misc_feature 1..18: note = Synthetic
  source 1..18: mol_type = other DNA
tcctgctggcttccgctg

SEQ ID NO: 3823 - DNA, 18 bp, synthetic construct
  misc_feature 1..18: note = Synthetic
  source 1..18: mol_type = other DNA
ctgctggcttccgctgcg

SEQ ID NO: 3824 - DNA, 18 bp, synthetic construct
  misc_feature 1..18: note = Synthetic
  source 1..18: mol_type = other DNA
gctggcttccgctgcgca

SEQ ID NO: 3825 - DNA, 18 bp, synthetic construct
  misc_feature 1..18: note = Synthetic
  source 1..18: mol_type = other DNA
tggcttccgctgcgcagc

SEQ ID NO: 3826 - DNA, 18 bp, synthetic construct
  misc_feature 1..18: note = Synthetic
  source 1..18: mol_type = other DNA
gcttccgctgcgcagcca

SEQ ID NO: 3827 - DNA, 18 bp, synthetic construct
  misc_feature 1..18: note = Synthetic
  source 1..18: mol_type = other DNA
ttccgctgcgcagccagg

SEQ ID NO: 3828 - DNA, 18 bp, synthetic construct
  misc_feature 1..18: note = Synthetic
  source 1..18: mol_type = other DNA
ccgctgcgcagccagggg

SEQ ID NO: 3829 - DNA, 18 bp, synthetic construct
  misc_feature 1..18: note = Synthetic
  source 1..18: mol_type = other DNA
gctgcgcagccaggggta

SEQ ID NO: 3830 - DNA, 18 bp, synthetic construct
  misc_feature 1..18: note = Synthetic
  source 1..18: mol_type = other DNA
tgcgcagccaggggtacc

SEQ ID NO: 3831 - DNA, 18 bp, synthetic construct
  misc_feature 1..18: note = Synthetic
  source 1..18: mol_type = other DNA
cgcagccaggggtaccaa

SEQ ID NO: 3832 - DNA, 18 bp, synthetic construct
  misc_feature 1..18: note = Synthetic
  source 1..18: mol_type = other DNA
cagccaggggtaccaagt

SEQ ID NO: 3833 - DNA, 18 bp, synthetic construct
  misc_feature 1..18: note = Synthetic
  source 1..18: mol_type = other DNA
gccaggggtaccaagtgt

SEQ ID NO: 3834 - DNA, 18 bp, synthetic construct
  misc_feature 1..18: note = Synthetic
  source 1..18: mol_type = other DNA
caggggtaccaagtgttt

SEQ ID NO: 3835 - DNA, 18 bp, synthetic construct
  misc_feature 1..18: note = Synthetic
  source 1..18: mol_type = other DNA
ggggtaccaagtgtttgc

SEQ ID NO: 3836 - DNA, 18 bp, synthetic construct
  misc_feature 1..18: note = Synthetic
  source 1..18: mol_type = other DNA
ggtaccaagtgtttgcgc

SEQ ID NO: 3837 - DNA, 18 bp, synthetic construct
  misc_feature 1..18: note = Synthetic
  source 1..18: mol_type = other DNA
taccaagtgtttgcgcag

SEQ ID NO: 3838 - DNA, 18 bp, synthetic construct
  misc_feature 1..18: note = Synthetic
  source 1..18: mol_type = other DNA
ccaagtgtttgcgcaggg

SEQ ID NO: 3839 - DNA, 18 bp, synthetic construct
  misc_feature 1..18: note = Synthetic
  source 1..18: mol_type = other DNA
aagtgtttgcgcagggag

SEQ ID NO: 3840 - DNA, 18 bp, synthetic construct
  misc_feature 1..18: note = Synthetic
  source 1..18: mol_type = other DNA
gtgtttgcgcagggaggc

SEQ ID NO: 3841 - DNA, 18 bp, synthetic construct
  misc_feature 1..18: note = Synthetic
  source 1..18: mol_type = other DNA
gtttgcgcagggaggccc

SEQ ID NO: 3842 - DNA, 18 bp, synthetic construct
  misc_feature 1..18: note = Synthetic
  source 1..18: mol_type = other DNA
ttgcgcagggaggccccg

SEQ ID NO: 3843 - DNA, 18 bp, synthetic construct
  misc_feature 1..18: note = Synthetic
  source 1..18: mol_type = other DNA
gcgcagggaggccccgcg

SEQ ID NO: 3844 - DNA, 18 bp, synthetic construct
  misc_feature 1..18: note = Synthetic
  source 1..18: mol_type = other DNA
gcagggaggccccgcgct

SEQ ID NO: 3845 - DNA, 18 bp, synthetic construct
  misc_feature 1..18: note = Synthetic
  source 1..18: mol_type = other DNA
agggaggccccgcgctgg

SEQ ID NO: 3846 - DNA, 18 bp, synthetic construct
  misc_feature 1..18: note = Synthetic
  source 1..18: mol_type = other DNA
ggaggccccgcgctggga

SEQ ID NO: 3847 - DNA, 18 bp, synthetic construct
  misc_feature 1..18: note = Synthetic
  source 1..18: mol_type = other DNA
aggccccgcgctgggacg

SEQ ID NO: 3848 - DNA, 18 bp, synthetic construct
  misc_feature 1..18: note = Synthetic
  source 1..18: mol_type = other DNA
gccccgcgctgggacgcc

SEQ ID NO: 3849 - DNA, 18 bp, synthetic construct
  misc_feature 1..18: note = Synthetic
  source 1..18: mol_type = other DNA
cccgcgctgggacgcccc

SEQ ID NO: 3850 - DNA, 18 bp, synthetic construct
  misc_feature 1..18: note = Synthetic
  source 1..18: mol_type = other DNA
cgcgctgggacgcccctt

SEQ ID NO: 3851 - DNA, 18 bp, synthetic construct
  misc_feature 1..18: note = Synthetic
  source 1..18: mol_type = other DNA
cgctgggacgcccctttg

SEQ ID NO: 3852 - DNA, 18 bp, synthetic construct
  misc_feature 1..18: note = Synthetic
  source 1..18: mol_type = other DNA
ctgggacgcccctttgag

SEQ ID NO: 3853 - DNA, 18 bp, synthetic construct
  misc_feature 1..18: note = Synthetic
  source 1..18: mol_type = other DNA
gggacgcccctttgaggg

SEQ ID NO: 3854 - DNA, 18 bp, synthetic construct
  misc_feature 1..18: note = Synthetic
  source 1..18: mol_type = other DNA
gacgcccctttgagggac

SEQ ID NO: 3855 - DNA, 18 bp, synthetic construct
  misc_feature 1..18: note = Synthetic
  source 1..18: mol_type = other DNA
cgcccctttgagggaccc

SEQ ID NO: 3856 - DNA, 18 bp, synthetic construct
  misc_feature 1..18: note = Synthetic
  source 1..18: mol_type = other DNA
cccctttgagggacccag

SEQ ID NO: 3857 - DNA, 18 bp, synthetic construct
  misc_feature 1..18: note = Synthetic
  source 1..18: mol_type = other DNA
cctttgagggacccagcc

SEQ ID NO: 3858 - DNA, 18 bp, synthetic construct
  misc_feature 1..18: note = Synthetic
  source 1..18: mol_type = other DNA
tttgagggacccagcctt

SEQ ID NO: 3859 - DNA, 18 bp, synthetic construct
  misc_feature 1..18: note = Synthetic
  source 1..18: mol_type = other DNA
tgagggacccagccttga

SEQ ID NO: 3860 - DNA, 18 bp, synthetic construct
  misc_feature 1..18: note = Synthetic
  source 1..18: mol_type = other DNA
agggacccagccttgaga

SEQ ID NO: 3861 - DNA, 18 bp, synthetic construct
  misc_feature 1..18: note = Synthetic
  source 1..18: mol_type = other DNA
ggacccagccttgagaca

SEQ ID NO: 3862 - DNA, 18 bp, synthetic construct
  misc_feature 1..18: note = Synthetic
  source 1..18: mol_type = other DNA
acccagccttgagacagc

SEQ ID NO: 3863 - DNA, 18 bp, synthetic construct
  misc_feature 1..18: note = Synthetic
  source 1..18: mol_type = other DNA
ccagccttgagacagctg

SEQ ID NO: 3864 - DNA, 18 bp, synthetic construct
  misc_feature 1..18: note = Synthetic
  source 1..18: mol_type = other DNA
agccttgagacagctgct

SEQ ID NO: 3865 - DNA, 18 bp, synthetic construct
  misc_feature 1..18: note = Synthetic
  source 1..18: mol_type = other DNA
ccttgagacagctgctgt

SEQ ID NO: 3866 - DNA, 18 bp, synthetic construct
  misc_feature 1..18: note = Synthetic
  source 1..18: mol_type = other DNA
ttgagacagctgctgtga

SEQ ID NO: 3867 - DNA, 18 bp, synthetic construct
  misc_feature 1..18: note = Synthetic
  source 1..18: mol_type = other DNA
gcggagtcggacgcaggc

SEQ ID NO: 3868 - DNA, 18 bp, synthetic construct
  misc_feature 1..18: note = Synthetic
  source 1..18: mol_type = other DNA
ggagtcggacgcaggcag

SEQ ID NO: 3869 - DNA, 18 bp, synthetic construct
  misc_feature 1..18: note = Synthetic
  source 1..18: mol_type = other DNA
agtcggacgcaggcagac

SEQ ID NO: 3870 - DNA, 18 bp, synthetic construct
  misc_feature 1..18: note = Synthetic
  source 1..18: mol_type = other DNA
tcggacgcaggcagacca

SEQ ID NO: 3871 - DNA, 18 bp, synthetic construct
  misc_feature 1..18: note = Synthetic
  source 1..18: mol_type = other DNA
ggacgcaggcagaccatg

SEQ ID NO: 3872 - DNA, 18 bp, synthetic construct
  misc_feature 1..18: note = Synthetic
  source 1..18: mol_type = other DNA
acgcaggcagaccatgtg

SEQ ID NO: 3873 - DNA, 18 bp, synthetic construct
  misc_feature 1..18: note = Synthetic
  source 1..18: mol_type = other DNA
ctgccgtccccttctgga

SEQ ID NO: 3874 - DNA, 18 bp, synthetic construct
  misc_feature 1..18: note = Synthetic
  source 1..18: mol_type = other DNA
gccgtccccttctggaca

SEQ ID NO: 3875 - DNA, 18 bp, synthetic construct
  misc_feature 1..18: note = Synthetic
  source 1..18: mol_type = other DNA
cgtccccttctggacaaa

SEQ ID NO: 3876 - DNA, 18 bp, synthetic construct
  misc_feature 1..18: note = Synthetic
  source 1..18: mol_type = other DNA
tccccttctggacaaatg

SEQ ID NO: 3877 - DNA, 18 bp, synthetic construct
  misc_feature 1..18: note = Synthetic
  source 1..18: mol_type = other DNA
cccttctggacaaatggc

SEQ ID NO: 3878 - DNA, 18 bp, synthetic construct
  misc_feature 1..18: note = Synthetic
  source 1..18: mol_type = other DNA
cttctggacaaatggccc

SEQ ID NO: 3879 - DNA, 18 bp, synthetic construct
  misc_feature 1..18: note = Synthetic
  source 1..18: mol_type = other DNA
tctggacaaatggcccac

SEQ ID NO: 3880 - DNA, 18 bp, synthetic construct
  misc_feature 1..18: note = Synthetic
  source 1..18: mol_type = other DNA
tggacaaatggcccacaa

SEQ ID NO: 3881 - DNA, 18 bp, synthetic construct
  misc_feature 1..18: note = Synthetic
  source 1..18: mol_type = other DNA
tgccccttcccagaggcc

SEQ ID NO: 3882 - DNA, 18 bp, synthetic construct
  misc_feature 1..18: note = Synthetic
  source 1..18: mol_type = other DNA
ccccttcccagaggccgt

SEQ ID NO: 3883 - DNA, 18 bp, synthetic construct
  misc_feature 1..18: note = Synthetic
  source 1..18: mol_type = other DNA
ccttcccagaggccgtgg

SEQ ID NO: 3884 - DNA, 18 bp, synthetic construct
  misc_feature 1..18: note = Synthetic
  source 1..18: mol_type = other DNA
ttcccagaggccgtggca

SEQ ID NO: 3885 - DNA, 18 bp, synthetic construct
  misc_feature 1..18: note = Synthetic
  source 1..18: mol_type = other DNA
cccagaggccgtggcatg

SEQ ID NO: 3886 - DNA, 18 bp, synthetic construct
  misc_feature 1..18: note = Synthetic
  source 1..18: mol_type = other DNA
cagaggccgtggcatgcg

SEQ ID NO: 3887 - DNA, 18 bp, synthetic construct
  misc_feature 1..18: note = Synthetic
  source 1..18: mol_type = other DNA
gaggccgtggcatgcggg

SEQ ID NO: 3888 - DNA, 18 bp, synthetic construct
  misc_feature 1..18: note = Synthetic
  source 1..18: mol_type = other DNA
cttccaaagatcaggtaa

SEQ ID NO: 3889 - DNA, 18 bp, synthetic construct
  misc_feature 1..18: note = Synthetic
  source 1..18: mol_type = other DNA
tccaaagatcaggtaaca

SEQ ID NO: 3890 - DNA, 18 bp, synthetic construct
  misc_feature 1..18: note = Synthetic
  source 1..18: mol_type = other DNA
caaagatcaggtaacaac

SEQ ID NO: 3891 - DNA, 18 bp, synthetic construct
  misc_feature 1..18: note = Synthetic
  source 1..18: mol_type = other DNA
aagatcaggtaacaactc

SEQ ID NO: 3892 - DNA, 18 bp, synthetic construct
  misc_feature 1..18: note = Synthetic
  source 1..18: mol_type = other DNA
gatcaggtaacaactccg

SEQ ID NO: 3893 - DNA, 18 bp, synthetic construct
  misc_feature 1..18: note = Synthetic
  source 1..18: mol_type = other DNA
tcaggtaacaactccgtg

SEQ ID NO: 3894 - DNA, 18 bp, synthetic construct
  misc_feature 1..18: note = Synthetic
  source 1..18: mol_type = other DNA
tgccccatgccccaggct

SEQ ID NO: 3895 - DNA, 18 bp, synthetic construct
  misc_feature 1..18: note = Synthetic
  source 1..18: mol_type = other DNA
ccccatgccccaggcttc

SEQ ID NO: 3896 - DNA, 18 bp, synthetic construct
  misc_feature 1..18: note = Synthetic
  source 1..18: mol_type = other DNA
ccatgccccaggcttcct

SEQ ID NO: 3897 - DNA, 18 bp, synthetic construct
  misc_feature 1..18: note = Synthetic
  source 1..18: mol_type = other DNA
atgccccaggcttcctgc

SEQ ID NO: 3898 - DNA, 18 bp, synthetic construct
  misc_feature 1..18: note = Synthetic
  source 1..18: mol_type = other DNA
gccccaggcttcctgctg

SEQ ID NO: 3899 - DNA, 18 bp, synthetic construct
  misc_feature 1..18: note = Synthetic
  source 1..18: mol_type = other DNA
cccaggcttcctgctgtg

SEQ ID NO: 3900 - DNA, 18 bp, synthetic construct
  misc_feature 1..18: note = Synthetic
  source 1..18: mol_type = other DNA
gaggactaacagggcagt

SEQ ID NO: 3901 - DNA, 18 bp, synthetic construct
  misc_feature 1..18: note = Synthetic
  source 1..18: mol_type = other DNA
ggactaacagggcagtgg

SEQ ID NO: 3902 - DNA, 18 bp, synthetic construct
  misc_feature 1..18: note = Synthetic
  source 1..18: mol_type = other DNA
actaacagggcagtggcc

SEQ ID NO: 3903 - DNA, 18 bp, synthetic construct
  misc_feature 1..18: note = Synthetic
  source 1..18: mol_type = other DNA
taacagggcagtggcctt

SEQ ID NO: 3904 - DNA, 18 bp, synthetic construct
  misc_feature 1..18: note = Synthetic
  source 1..18: mol_type = other DNA
acagggcagtggccttgt

SEQ ID NO: 3905 - DNA, 18 bp, synthetic construct
  misc_feature 1..18: note = Synthetic
  source 1..18: mol_type = other DNA
agggcagtggccttgtcc

SEQ ID NO: 3906 - DNA, 18 bp, synthetic construct
  misc_feature 1..18: note = Synthetic
  source 1..18: mol_type = other DNA
ggcagtggccttgtccag

SEQ ID NO: 3907 - DNA, 18 bp, synthetic construct
  misc_feature 1..18: note = Synthetic
  source 1..18: mol_type = other DNA
ctgcccaatgcccaacgc

SEQ ID NO: 3908 - DNA, 18 bp, synthetic construct
  misc_feature 1..18: note = Synthetic
  source 1..18: mol_type = other DNA
gcccaatgcccaacgcca

SEQ ID NO: 3909 - DNA, 18 bp, synthetic construct
  misc_feature 1..18: note = Synthetic
  source 1..18: mol_type = other DNA
ccaatgcccaacgccacc

SEQ ID NO: 3910 - DNA, 18 bp, synthetic construct
  misc_feature 1..18: note = Synthetic
  source 1..18: mol_type = other DNA
aatgcccaacgccacctg

SEQ ID NO: 3911 - DNA, 18 bp, synthetic construct
  misc_feature 1..18: note = Synthetic
  source 1..18: mol_type = other DNA
tgcccaacgccacctgct

SEQ ID NO: 3912 - DNA, 18 bp, synthetic construct
  misc_feature 1..18: note = Synthetic
  source 1..18: mol_type = other DNA
cccaacgccacctgctgc

SEQ ID NO: 3913 - DNA, 18 bp, synthetic construct
  misc_feature 1..18: note = Synthetic
  source 1..18: mol_type = other DNA
caacgccacctgctgctc

SEQ ID NO: 3914 - DNA, 18 bp, synthetic construct
  misc_feature 1..18: note = Synthetic
  source 1..18: mol_type = other DNA
acgccacctgctgctccg

SEQ ID NO: 3915 - DNA, 18 bp, synthetic construct
  misc_feature 1..18: note = Synthetic
  source 1..18: mol_type = other DNA
gctgcctgcgcacacagt

SEQ ID NO: 3916 - DNA, 18 bp, synthetic construct
  misc_feature 1..18: note = Synthetic
  source 1..18: mol_type = other DNA
tgcctgcgcacacagtgg

SEQ ID NO: 3917 - DNA, 18 bp, synthetic construct
  misc_feature 1..18: note = Synthetic
  source 1..18: mol_type = other DNA
cctgcgcacacagtgggg

SEQ ID NO: 3918 - DNA, 18 bp, synthetic construct
  misc_feature 1..18: note = Synthetic
  source 1..18: mol_type = other DNA
tgcgcacacagtggggga

SEQ ID NO: 3919 - DNA, 18 bp, synthetic construct
  misc_feature 1..18: note = Synthetic
  source 1..18: mol_type = other DNA
cgcacacagtgggggatg

SEQ ID NO: 3920 - DNA, 18 bp, synthetic construct
  misc_feature 1..18: note = Synthetic
  source 1..18: mol_type = other DNA
cacacagtgggggatgtg

SEQ ID NO: 3921 - DNA, 18 bp, synthetic construct
  misc_feature 1..18: note = Synthetic
  source 1..18: mol_type = other DNA
ctgcccttttacccaggc

SEQ ID NO: 3922 - DNA, 18 bp, synthetic construct
  misc_feature 1..18: note = Synthetic
  source 1..18: mol_type = other DNA
gcccttttacccaggctg

SEQ ID NO: 3923 - DNA, 18 bp, synthetic construct
  misc_feature 1..18: note = Synthetic
  source 1..18: mol_type = other DNA
ccttttacccaggctgtg

SEQ ID NO: 3924 - DNA, 18 bp, synthetic construct
  misc_feature 1..18: note = Synthetic
  source 1..18: mol_type = other DNA
ttttacccaggctgtgtg

SEQ ID NO: 3925 - DNA, 18 bp, synthetic construct
  misc_feature 1..18: note = Synthetic
  source 1..18: mol_type = other DNA
ttacccaggctgtgtgct

SEQ ID NO: 3926 - DNA, 18 bp, synthetic construct
  misc_feature 1..18: note = Synthetic
  source 1..18: mol_type = other DNA
acccaggctgtgtgctgt

SEQ ID NO: 3927 - DNA, 18 bp, synthetic construct
  misc_feature 1..18: note = Synthetic
  source 1..18: mol_type = other DNA
ccaggctgtgtgctgtga

SEQ ID NO: 3928 - DNA, 18 bp, synthetic construct
  misc_feature 1..18: note = Synthetic
  source 1..18: mol_type = other DNA
ctgtccaatcccagaggc

SEQ ID NO: 3929 - DNA, 18 bp, synthetic construct
  misc_feature 1..18: note = Synthetic
  source 1..18: mol_type = other DNA
gtccaatcccagaggctg

SEQ ID NO: 3930 - DNA, 18 bp, synthetic construct
  misc_feature 1..18: note = Synthetic
  source 1..18: mol_type = other DNA
ccaatcccagaggctgtc

SEQ ID NO: 3931 - DNA, 18 bp, synthetic construct
  misc_feature 1..18: note = Synthetic
  source 1..18: mol_type = other DNA
aatcccagaggctgtctg

SEQ ID NO: 3932 - DNA, 18 bp, synthetic construct
  misc_feature 1..18: note = Synthetic
  source 1..18: mol_type = other DNA
tcccagaggctgtctgct

SEQ ID NO: 3933 - DNA, 18 bp, synthetic construct
  misc_feature 1..18: note = Synthetic
  source 1..18: mol_type = other DNA
ccagaggctgtctgctgc

SEQ ID NO: 3934 - DNA, 18 bp, synthetic construct
  misc_feature 1..18: note = Synthetic
  source 1..18: mol_type = other DNA
agaggctgtctgctgctc

SEQ ID NO: 3935 - DNA, 18 bp, synthetic construct
  misc_feature 1..18: note = Synthetic
  source 1..18: mol_type = other DNA
ctgccagttgccccatgc

SEQ ID NO: 3936 - DNA, 18 bp, synthetic construct
  misc_feature 1..18: note = Synthetic
  source 1..18: mol_type = other DNA
gccagttgccccatgctg

SEQ ID NO: 3937 - DNA, 18 bp, synthetic construct
  misc_feature 1..18: note = Synthetic
  source 1..18: mol_type = other DNA
cagttgccccatgctgtg

SEQ ID NO: 3938 - DNA, 18 bp, synthetic construct
  misc_feature 1..18: note = Synthetic
  source 1..18: mol_type = other DNA
gttgccccatgctgtgtg

SEQ ID NO: 3939 - DNA, 18 bp, synthetic construct
  misc_feature 1..18: note = Synthetic
  source 1..18: mol_type = other DNA
tgccccatgctgtgtgct

SEQ ID NO: 3940 - DNA, 18 bp, synthetic construct
  misc_feature 1..18: note = Synthetic
  source 1..18: mol_type = other DNA
ccccatgctgtgtgctgc

SEQ ID NO: 3941 - DNA, 18 bp, synthetic construct
  misc_feature 1..18: note = Synthetic
  source 1..18: mol_type = other DNA
ccatgctgtgtgctgcga

SEQ ID NO: 3942 - DNA, 18 bp, synthetic construct
  misc_feature 1..18: note = Synthetic
  source 1..18: mol_type = other DNA
atgctgtgtgctgcgagg

SEQ ID NO: 3943 - DNA, 18 bp, synthetic construct
  misc_feature 1..18: note = Synthetic
  source 1..18: mol_type = other DNA
ctgtccctaccgccaggg

SEQ ID NO: 3944 - DNA, 18 bp, synthetic construct
  misc_feature 1..18: note = Synthetic
  source 1..18: mol_type = other DNA
gtccctaccgccagggcg

SEQ ID NO: 3945 - DNA, 18 bp, synthetic construct
  misc_feature 1..18: note = Synthetic
  source 1..18: mol_type = other DNA
ccctaccgccagggcgtc

SEQ ID NO: 3946 - DNA, 18 bp, synthetic construct
  misc_feature 1..18: note = Synthetic
  source 1..18: mol_type = other DNA
ctaccgccagggcgtctg

SEQ ID NO: 3947 - DNA, 18 bp, synthetic construct
  misc_feature 1..18: note = Synthetic
  source 1..18: mol_type = other DNA
accgccagggcgtctgtt

SEQ ID NO: 3948 - DNA, 18 bp, synthetic construct
  misc_feature 1..18: note = Synthetic
  source 1..18: mol_type = other DNA
cgccagggcgtctgttgt

SEQ ID NO: 3949 - RNA, 58 nt, Mus musculus
  modified_base 5: mod_base = OTHER; note = thymine
  modified_base 12: mod_base = OTHER; note = thymine
  modified_base 21: mod_base = OTHER; note = thymine
  modified_base 25: mod_base = OTHER; note = thymine
  modified_base 27: mod_base = OTHER; note = thymine
  modified_base 36: mod_base = OTHER; note = thymine
  modified_base 40: mod_base = OTHER; note = thymine
  modified_base 43: mod_base = OTHER; note = thymine
  modified_base 49..50: mod_base = OTHER; note = thymine
  modified_base 55: mod_base = OTHER; note = thymine
  source 1..58: mol_type = mRNA
caagtaaccaatggaagccctggatctccgagcaatggctaatggaaattgaggtggg

SEQ ID NO: 3950 - RNA, 57 nt, Homo sapiens; identical to SEQ ID NO: 689
  modified_base 1: mod_base = OTHER; note = thymine
  modified_base 5: mod_base = OTHER; note = thymine
  modified_base 12: mod_base = OTHER; note = thymine
  modified_base 22: mod_base = OTHER; note = thymine
  modified_base 28: mod_base = OTHER; note = thymine
  modified_base 31: mod_base = OTHER; note = thymine
  modified_base 35: mod_base = OTHER; note = thymine
  modified_base 42: mod_base = OTHER; note = thymine
  modified_base 49: mod_base = OTHER; note = thymine
  modified_base 54: mod_base = OTHER; note = thymine
  source 1..57: mol_type = mRNA

SEQ ID NO: 3951 - RNA, 58 nt, Macaca fascicularis
  source 1..58: mol_type = mRNA
  modified_base 1: mod_base = OTHER; note = thymine
  modified_base 5: mod_base = OTHER; note = thymine
  modified_base 12: mod_base = OTHER; note = thymine
  modified_base 18: mod_base = OTHER; note = thymine
  modified_base 29: mod_base = OTHER; note = thymine
  modified_base 32: mod_base = OTHER; note = thymine
  modified_base 36: mod_base = OTHER; note = thymine
  modified_base 43: mod_base = OTHER; note = thymine
  modified_base 50: mod_base = OTHER; note = thymine
  modified_base 55: mod_base = OTHER; note = thymine
taagtagccaatgggagtgcggcagccctgatccctggccaatggaaactgaggtagg

1. An antisense oligonucleotide progranulin agonist, wherein the antisense oligonucleotide is 8-40 nucleotides in length and comprises a contiguous nucleotide sequence of 8-40 nucleotides in length which are complementary to a human progranulin precursor-mRNA (pre-mRNA) or mature mRNA transcript

2. The antisense oligonucleotide progranulin agonist of claim 1, wherein the human progranulin mature mRNA transcript is SEQ ID NO 1.

3. The antisense oligonucleotide progranulin agonist of claim 1, wherein the human progranulin precursor-mRNA (pre-mRNA) is SEQ ID NO 3949.

4. The antisense oligonucleotide progranulin agonist according to any one of claims 1-3, wherein the contiguous nucleotide sequence is of a length of at least 12 nucleotides in length.

5. The antisense oligonucleotide progranulin agonist according to claim 4, wherein the contiguous nucleotide sequence is 12-16 or 12-18 nucleotides in length.

6. The antisense oligonucleotide progranulin agonist according to claim 4, wherein the contiguous nucleotide sequence is 12, 13, 14, 15, 16, 17, 18, 19, 20, 21, 22, 23, 24, 25, 26, 27, 28, 29, 30, 31, 32, 33, 34, 35, 36, 37, 38, 39 or 40 nucleotides in length.

7. The antisense oligonucleotide progranulin agonist according to any one of claims 1-6, wherein the contiguous nucleotide sequence is the same length as the antisense oligonucleotide.

8. The antisense oligonucleotide progranulin agonist according to any one of claims 1-7, wherein the contiguous nucleotide sequence is fully complementary to the human progranulin precursor-mRNA (pre-mRNA) or mature mRNA transcript.

9. The antisense oligonucleotide progranulin agonist according to any one of claims 1-8, wherein the contiguous nucleotide sequence is complementary to a 5′UTR region of a human progranulin mature mRNA transcript.

10. The antisense oligonucleotide progranulin agonist according to claim 9, wherein the contiguous nucleotide sequence is complementary to SEQ ID NO 2, SEQ ID NO 689, SEQ ID NO 683, or a sequence selected from the group consisting of SEQ ID NO 343-586.

11. The antisense oligonucleotide progranulin agonist according to any one of claims 1-9, wherein the contiguous nucleotide sequence is complementary to nucleotides 38-246 of SEQ ID NO 1.

12. The antisense oligonucleotide progranulin agonist according to any one of claims 1-9, wherein the contiguous nucleotide sequence is fully complementary to SEQ ID NO 2, or SEQ ID NO 689.

13. The antisense oligonucleotide progranulin agonist according to any one of claims 1-9, wherein the contiguous nucleotide sequence is fully complementary to a sequence selected from the group consisting of SEQ ID NO 568, SEQ ID NO 571, SEQ ID NO 575, SEQ ID NO 576, SEQ ID NO 577, SEQ ID NO 578, SEQ ID NO 584 & SEQ ID NO 586.

14. The antisense oligonucleotide progranulin agonist according to any one of claims 1-13, wherein the contiguous nucleotide sequence is a sequence selected from the group consisting of SEQ ID NO 3-342, or at least 8 or at least 10 contiguous nucleotides thereof.

15. The antisense oligonucleotide progranulin agonist according to any one of claims 1-14, wherein the contiguous nucleotide sequence is selected from SEQ ID NO 105, SEQ ID NO 106, SEQ ID NO 110, SEQ ID NO 113, SEQ ID NO 114, SEQ ID NO 231 and SEQ ID NO 241 or at least 8 or at least 10 contiguous nucleotides thereof.

16. The antisense oligonucleotide progranulin agonist according to any one of claims 1-8, wherein contiguous nucleotide sequence is complementary to a 3′UTR region of a human progranulin mature mRNA transcript.

17. The antisense oligonucleotide progranulin agonist according to claim 16, wherein the contiguous nucleotide sequence is complementary to SEQ ID NO 684, SEQ ID NO 685, SEQ ID NO 686, SEQ ID NO 687, SEQ ID NO 688, or a sequence selected from the group consisting of SEQ ID NO 587-682.

18. The antisense oligonucleotide progranulin agonist according to claim 16, wherein the contiguous nucleotide sequence is complementary to nucleotides 2039-2346 of SEQ ID NO 1.

19. The antisense oligonucleotide progranulin agonist according to any one of claims 16-18 wherein the contiguous nucleotide sequence is fully complementary to a sequence selected from the group consisting of SEQ ID NO 684, SEQ ID NO 685, SEQ ID NO 686, SEQ ID NO 687, and SEQ ID NO 688.

20. The antisense oligonucleotide progranulin agonist according to any one of claims 16-19 wherein the contiguous nucleotide sequence is fully complementary to a sequence selected from the group consisting of SEQ ID NO 607, SEQ ID NO 608, SEQ ID NO 609, SEQ ID NO 610, SEQ ID NO 611, SEQ ID NO 612, SEQ ID NO 619, SEQ ID NO 620, SEQ ID NO 633, SEQ ID NO 640, SEQ ID NO 641, SEQ ID NO 645, SEQ ID NO 651, and SEQ ID NO 652.

21. The antisense oligonucleotide progranulin agonist according to any one of claims 16-20, wherein the contiguous nucleotide sequence is selected from SEQ ID NO 267, SEQ ID NO 268, SEQ ID NO 269, SEQ ID NO 270, SEQ ID NO 271, SEQ ID NO 272, SEQ ID NO 279, SEQ ID NO 280, SEQ ID NO 293, SEQ ID NO 300, SEQ ID NO 301, SEQ ID NO 305, SEQ ID NO 311, and SEQ ID NO 312, or at least 8 or at least 10 contiguous nucleotides thereof.

22. The antisense oligonucleotide progranulin agonist according to any one of claims 1-8, wherein the contiguous nucleotide sequence is complementary to a sequence selected from the group consisting of SEQ ID NO 2040-3386.

23. The antisense oligonucleotide progranulin agonist according to claim 22, wherein the contiguous nucleotide sequence is complementary to a sequence selected from the group consisting of SEQ ID 2321, SEQ ID 2322, SEQ ID 2324, SEQ ID 2328, SEQ ID 2329, SEQ ID 2331, SEQ ID 2334, SEQ ID 2335, SEQ ID 2336, SEQ ID 2337, SEQ ID 2338, SEQ ID 2339, SEQ ID 2340, SEQ ID 2341, SEQ ID 2342, SEQ ID 2345, SEQ ID 2346, SEQ ID 2347, SEQ ID 2348, SEQ ID 2349, SEQ ID 2350, SEQ ID 2351, SEQ ID 2352, SEQ ID 2353, SEQ ID 2354, SEQ ID 2355, SEQ ID 2356, SEQ ID 2357, SEQ ID 2358, SEQ ID 2359, SEQ ID 2360, SEQ ID 2361, SEQ ID 2362, SEQ ID 2364, SEQ ID 2365, SEQ ID 2366, SEQ ID 2367, SEQ ID 2368, SEQ ID 2369, SEQ ID 2370, SEQ ID 2371, SEQ ID 2372, SEQ ID 2373, SEQ ID 2374, SEQ ID 2375, SEQ ID 2376, SEQ ID 2377, SEQ ID 2378, SEQ ID 2379, SEQ ID 2380, SEQ ID 2381, SEQ ID 2384, SEQ ID 2386, SEQ ID 2387, SEQ ID 2388, SEQ ID 2389, SEQ ID 2390, SEQ ID 2392, SEQ ID 2393, SEQ ID 2394, SEQ ID 2395, SEQ ID 2396, SEQ ID 2397, SEQ ID 2398, SEQ ID 2399, SEQ ID 2400, SEQ ID 2401, SEQ ID 2403, SEQ ID 2404, SEQ ID 2405, SEQ ID 2406, SEQ ID 2407, SEQ ID 2408, SEQ ID 2410, SEQ ID 2411, SEQ ID 2413, SEQ ID 2414, SEQ ID 2415, SEQ ID 2416, SEQ ID 2418, SEQ ID 2419, SEQ ID 2421, SEQ ID 2424, SEQ ID 2425, SEQ ID 2426, SEQ ID 2427, SEQ ID 2428, SEQ ID 2429, SEQ ID 2430, SEQ ID 2431, SEQ ID 2432, SEQ ID 2433, SEQ ID 2434, SEQ ID 2435, SEQ ID 2436, SEQ ID 2437, SEQ ID 2438, SEQ ID 2439, SEQ ID 2440, SEQ ID 2441, SEQ ID 2442, SEQ ID 2443, SEQ ID 2444, SEQ ID 2445, SEQ ID 2446, SEQ ID 2447, SEQ ID 2448, SEQ ID 2449, SEQ ID 2450, SEQ ID 2451, SEQ ID 2452, SEQ ID 2453, SEQ ID 2454, SEQ ID 2455, SEQ ID 2456, SEQ ID 2457, SEQ ID 2458, SEQ ID 2459, SEQ ID 2460, SEQ ID 2461, SEQ ID 2462, SEQ ID 2463, SEQ ID 2464, SEQ ID 2465, SEQ ID 2466, SEQ ID 2467, SEQ ID 2468, SEQ ID 2469, SEQ ID 2470, SEQ ID 2471, SEQ ID 2472, SEQ ID 2473, SEQ ID 2474, SEQ ID 2475, SEQ ID 2476, SEQ ID 2477, SEQ ID 2478, SEQ ID 2479, SEQ ID 2481, SEQ ID 2482, SEQ ID 2483, SEQ ID 2484, SEQ ID 2485, SEQ ID 2487, SEQ ID 2489, SEQ ID 2490, SEQ ID 2491, SEQ ID 2492, SEQ ID 2493, SEQ ID 2494, SEQ ID 2495, SEQ ID 2496, SEQ ID 2497, SEQ ID 2498, SEQ ID 2499, SEQ ID 2501, SEQ ID 2502, SEQ ID 2503, SEQ ID 2504, SEQ ID 2505, SEQ ID 2506, SEQ ID 2507, SEQ ID 2508, SEQ ID 2509, SEQ ID 2510, SEQ ID 2511, SEQ ID 2512, SEQ ID 2513, SEQ ID 2514, SEQ ID 2515, SEQ ID 2516, SEQ ID 2518, SEQ ID 2519, SEQ ID 2520, SEQ ID 2521, SEQ ID 2522, SEQ ID 2523, SEQ ID 2524, SEQ ID 2525, SEQ ID 2526, SEQ ID 2527, SEQ ID 2528, SEQ ID 2531, SEQ ID 2533, SEQ ID 2534, SEQ ID 2535, SEQ ID 2536, SEQ ID 2537, SEQ ID 2538, SEQ ID 2540, SEQ ID 2541, SEQ ID 2542, SEQ ID 2544, SEQ ID 2546, SEQ ID 2547, SEQ ID 2549, SEQ ID 2550, SEQ ID 2551, SEQ ID 2553, SEQ ID 2554, SEQ ID 2555, SEQ ID 2556, SEQ ID 2557, SEQ ID 2560, SEQ ID 2561, SEQ ID 2562, SEQ ID 2563, SEQ ID 2565, SEQ ID 2566, SEQ ID 2567, SEQ ID 2572, SEQ ID 2573, SEQ ID 2574, SEQ ID 2575, SEQ ID 2576, SEQ ID 2577, SEQ ID 2578, SEQ ID 2579, SEQ ID 2580, SEQ ID 2581, SEQ ID 2582, SEQ ID 2583, SEQ ID 2584, SEQ ID 2585, SEQ ID 2586, SEQ ID 2588, SEQ ID 2589, SEQ ID 2590, SEQ ID 2591, SEQ ID 2592, SEQ ID 2593, SEQ ID 2594, SEQ ID 2595, SEQ ID 2596, SEQ ID 2597, SEQ ID 2598, SEQ ID 2599, SEQ ID 2601, SEQ ID 2602, SEQ ID 2603, SEQ ID 2604, SEQ ID 2606, SEQ ID 2610, SEQ ID 2613, SEQ ID 2614, SEQ ID 2615, SEQ ID 2619, SEQ ID 2622, SEQ ID 2623, SEQ ID 2624, SEQ ID 2625, SEQ ID 2626, SEQ ID 2627, SEQ ID 2628, SEQ ID 2629, SEQ ID 2630, SEQ ID 2631, SEQ ID 2632, SEQ ID 2633, SEQ ID 2634, SEQ ID 2635, SEQ ID 2636, SEQ ID 2637, SEQ ID 2638, SEQ ID 2639, SEQ ID 2640, SEQ ID 2641, SEQ ID 2642, SEQ ID 2643, SEQ ID 2644, SEQ ID 2645, SEQ ID 2646, SEQ ID 2647, SEQ ID 2648, SEQ ID 2649, SEQ ID 2650, SEQ ID 2651, SEQ ID 2652, SEQ ID 2653, SEQ ID 2654, SEQ ID 2655, SEQ ID 2656, SEQ ID 2658, SEQ ID 2659, SEQ ID 2660, SEQ ID 2661, SEQ ID 2662, SEQ ID 2663, SEQ ID 2664, SEQ ID 2665, SEQ ID 2666, SEQ ID 2667, SEQ ID 2668, SEQ ID 2669, SEQ ID 2670, SEQ ID 2671, SEQ ID 2672, SEQ ID 2673, SEQ ID 2674, SEQ ID 2675, SEQ ID 2676, SEQ ID 2677, SEQ ID 2678, SEQ ID 2679, SEQ ID 2680, SEQ ID 2681, SEQ ID 2682, SEQ ID 2683, SEQ ID 2684, SEQ ID 2685, SEQ ID 2686, SEQ ID 2687, SEQ ID 2688, SEQ ID 2689, SEQ ID 2690, SEQ ID 2691, SEQ ID 2693, SEQ ID 2694, SEQ ID 2695, SEQ ID 2696, SEQ ID 2697, SEQ ID 2698, SEQ ID 2699, SEQ ID 2700, SEQ ID 2701, SEQ ID 2702, SEQ ID 2703, SEQ ID 2704, SEQ ID 2705, SEQ ID 2706, SEQ ID 2707, SEQ ID 2708, SEQ ID 2709, SEQ ID 2710, SEQ ID 2711, SEQ ID 2712, SEQ ID 2713, SEQ ID 2714, SEQ ID 2715, SEQ ID 2716, SEQ ID 2717, SEQ ID 2718, SEQ ID 2719, SEQ ID 2720, SEQ ID 2721, SEQ ID 2722, SEQ ID 2723, SEQ ID 2726, SEQ ID 2727, SEQ ID 2728, SEQ ID 2729, SEQ ID 2730, SEQ ID 2733, SEQ ID 2734, SEQ ID 2735, SEQ ID 2736, SEQ ID 2737, SEQ ID 2738, SEQ ID 2739, SEQ ID 2740, SEQ ID 2741, SEQ ID 2742, SEQ ID 2743, SEQ ID 2744, SEQ ID 2745, SEQ ID 2746, SEQ ID 2747, SEQ ID 2748, SEQ ID 2749, SEQ ID 2750, SEQ ID 2751, SEQ ID 2752, SEQ ID 2753, SEQ ID 2754, SEQ ID 2755, SEQ ID 2756, SEQ ID 2757, SEQ ID 2758, SEQ ID 2759, SEQ ID 2760, SEQ ID 2761, SEQ ID 2762, SEQ ID 2763, SEQ ID 2764, SEQ ID 2765, SEQ ID 2766, SEQ ID 2767, SEQ ID 2768, SEQ ID 2769, SEQ ID 2770, SEQ ID 2771, SEQ ID 2772, SEQ ID 2773, SEQ ID 2774, SEQ ID 2775, SEQ ID 2815, SEQ ID 2816, SEQ ID 2817, SEQ ID 2818, SEQ ID 2819, SEQ ID 2820, SEQ ID 2821, SEQ ID 2822, SEQ ID 2823, SEQ ID 2824, SEQ ID 2825, SEQ ID 2826, SEQ ID 2827, SEQ ID 2828, SEQ ID 2829, SEQ ID 2830, SEQ ID 2831, SEQ ID 2832, SEQ ID 2833, SEQ ID 2834, SEQ ID 2835, SEQ ID 2836, SEQ ID 2837, SEQ ID 2838, SEQ ID 2839, SEQ ID 2840, SEQ ID 2841, SEQ ID 2842, SEQ ID 2843, SEQ ID 2844, SEQ ID 2845, SEQ ID 2847, SEQ ID 2848, SEQ ID 2849, SEQ ID 2850, SEQ ID 2851, SEQ ID 2852, SEQ ID 2853, SEQ ID 2854, SEQ ID 2855, SEQ ID 2858, SEQ ID 2859, SEQ ID 2860, SEQ ID 2861, SEQ ID 2862, SEQ ID 2863, SEQ ID 2864, SEQ ID 2865, SEQ ID 2866, SEQ ID 2867, SEQ ID 2868, SEQ ID 2869, SEQ ID 2870, SEQ ID 2871, SEQ ID 2872, SEQ ID 2873, SEQ ID 2874, SEQ ID 2875, SEQ ID 2876, SEQ ID 2878, SEQ ID 2879, SEQ ID 2880, SEQ ID 2881, SEQ ID 2882, SEQ ID 2883, SEQ ID 2884, SEQ ID 2885, SEQ ID 2886, SEQ ID 2887, SEQ ID 2888, SEQ ID 2889, SEQ ID 2890, SEQ ID 2891, SEQ ID 2892, SEQ ID 2893, SEQ ID 2894, SEQ ID 2895, SEQ ID 2896, SEQ ID 2897, SEQ ID 2898, SEQ ID 2899, SEQ ID 2900, SEQ ID 2901, SEQ ID 2902, SEQ ID 2903, SEQ ID 2904, SEQ ID 2905, SEQ ID 2906, SEQ ID 2907, SEQ ID 2908, SEQ ID 2909, SEQ ID 2910, SEQ ID 2911, SEQ ID 2912, SEQ ID 2913, SEQ ID 2914, SEQ ID 2915, SEQ ID 2916, SEQ ID 2917, SEQ ID 2918, SEQ ID 2919, SEQ ID 2920, SEQ ID 2921, SEQ ID 2922, SEQ ID 2923, SEQ ID 2924, SEQ ID 2925, SEQ ID 2926, SEQ ID 2927, SEQ ID 2928, SEQ ID 2929, SEQ ID 2930, SEQ ID 2931, SEQ ID 2932, SEQ ID 2934, SEQ ID 2935, SEQ ID 2936, SEQ ID 2937, SEQ ID 2938, SEQ ID 2939, SEQ ID 2940, SEQ ID 2941, SEQ ID 2942, SEQ ID 2943, SEQ ID 2944, SEQ ID 2945, SEQ ID 2946, SEQ ID 2947, SEQ ID 2948, SEQ ID 2949, SEQ ID 2950, SEQ ID 2951, SEQ ID 2953, SEQ ID 2954, SEQ ID 2955, SEQ ID 2956, SEQ ID 2957, SEQ ID 2958, SEQ ID 2960, SEQ ID 2961, SEQ ID 2963, SEQ ID 2964, SEQ ID 2965, SEQ ID 2966, SEQ ID 2967, SEQ ID 2969, SEQ ID 2970, SEQ ID 2971, SEQ ID 2972, SEQ ID 2973, SEQ ID 2974, SEQ ID 2975, SEQ ID 2976, SEQ ID 2977, SEQ ID 2978, SEQ ID 2979, SEQ ID 2980, SEQ ID 2981, SEQ ID 2982, SEQ ID 2983, SEQ ID 2984, SEQ ID 2985, SEQ ID 3053, SEQ ID 3054, SEQ ID 3055, SEQ ID 3056, SEQ ID 3057, SEQ ID 3058, SEQ ID 3059, SEQ ID 3060, SEQ ID 3061, SEQ ID 3062, SEQ ID 3063, SEQ ID 3064, SEQ ID 3065, SEQ ID 3066, SEQ ID 3068, SEQ ID 3069, SEQ ID 3070, SEQ ID 3071, SEQ ID 3072, SEQ ID 3073, SEQ ID 3074, SEQ ID 3075, SEQ ID 3076, SEQ ID 3077, SEQ ID 3078, SEQ ID 3079, SEQ ID 3080, SEQ ID 3081, SEQ ID 3082, SEQ ID 3083, SEQ ID 3084, SEQ ID 3085, SEQ ID 3086, SEQ ID 3087, SEQ ID 3088, SEQ ID 3089, SEQ ID 3090, SEQ ID 3091, SEQ ID 3092, SEQ ID 3093, SEQ ID 3094, SEQ ID 3095, SEQ ID 3097, SEQ ID 3098, SEQ ID 3099, SEQ ID 3100, SEQ ID 3102, SEQ ID 3103, SEQ ID 3104, SEQ ID 3105, SEQ ID 3106, SEQ ID 3107, SEQ ID 3108, SEQ ID 3109, SEQ ID 3110, SEQ ID 3112, SEQ ID 3113, SEQ ID 3115, SEQ ID 3116, SEQ ID 3117, SEQ ID 3119, SEQ ID 3120, SEQ ID 3121, SEQ ID 3122, SEQ ID 3123, SEQ ID 3124, SEQ ID 3125, SEQ ID 3126, SEQ ID 3127, SEQ ID 3128, SEQ ID 3129, SEQ ID 3130, SEQ ID 3131, SEQ ID 3132, SEQ ID 3133, SEQ ID 3134, SEQ ID 3135, SEQ ID 3136, SEQ ID 3137, SEQ ID 3138, SEQ ID 3139, SEQ ID 3140, SEQ ID 3141, SEQ ID 3142, SEQ ID 3143, SEQ ID 3144, SEQ ID 3145, SEQ ID 3146, SEQ ID 3147, SEQ ID 3148, SEQ ID 3149, SEQ ID 3150, SEQ ID 3151, SEQ ID 3152, SEQ ID 3153, SEQ ID 3154, SEQ ID 3155, SEQ ID 3156, SEQ ID 3157, SEQ ID 3158, SEQ ID 3159, SEQ ID 3160, SEQ ID 3161, SEQ ID 3162, SEQ ID 3163, SEQ ID 3164, SEQ ID 3165, SEQ ID 3166, SEQ ID 3167, SEQ ID 3168, SEQ ID 3169, SEQ ID 3170, SEQ ID 3171, SEQ ID 3172, SEQ ID 3173, SEQ ID 3174, SEQ ID 3175, SEQ ID 3176, SEQ ID 3177, SEQ ID 3178, SEQ ID 3179, SEQ ID 3180, SEQ ID 3181, SEQ ID 3182, SEQ ID 3183, SEQ ID 3184, SEQ ID 3185, SEQ ID 3186, SEQ ID 3187, SEQ ID 3188, SEQ ID 3189, SEQ ID 3190, SEQ ID 3191, SEQ ID 3192, SEQ ID 3193, SEQ ID 3194, SEQ ID 3195, SEQ ID 3196, SEQ ID 3197, SEQ ID 3198, SEQ ID 3199, SEQ ID 3200, SEQ ID 3201, SEQ ID 3202, SEQ ID 3203, SEQ ID 3204, SEQ ID 3205, SEQ ID 3206, SEQ ID 3207, SEQ ID 3208, SEQ ID 3209, SEQ ID 3210, SEQ ID 3211, SEQ ID 3212, SEQ ID 3213, SEQ ID 3214, SEQ ID 3215, SEQ ID 3216, SEQ ID 3217, SEQ ID 3218, SEQ ID 3219, SEQ ID 3220, SEQ ID 3221, SEQ ID 3222, SEQ ID 3223, SEQ ID 3224, SEQ ID 3225, SEQ ID 3226, SEQ ID 3227, SEQ ID 3228, SEQ ID 3229, SEQ ID 3230, SEQ ID 3231, SEQ ID 3232, SEQ ID 3233, SEQ ID 3234, SEQ ID 3235, SEQ ID 3236, SEQ ID 3237, SEQ ID 3238, SEQ ID 3239, SEQ ID 3240, SEQ ID 3241, SEQ ID 3242, SEQ ID 3243, SEQ ID 3244, SEQ ID 3245, SEQ ID 3246, SEQ ID 3248, SEQ ID 3249, SEQ ID 3250, SEQ ID 3251, SEQ ID 3252, SEQ ID 3253, SEQ ID 3254, SEQ ID 3255, SEQ ID 3256, SEQ ID 3257, SEQ ID 3258, SEQ ID 3259, SEQ ID 3260, SEQ ID 3261, SEQ ID 3262, SEQ ID 3263, SEQ ID 3264, SEQ ID 3265, SEQ ID 3266, SEQ ID 3267, SEQ ID 3268, SEQ ID 3269, SEQ ID 3270, SEQ ID 3271, SEQ ID 3272, SEQ ID 3273, SEQ ID 3275, SEQ ID 3276, SEQ ID 3277, SEQ ID 3278, SEQ ID 3279, SEQ ID 3280, SEQ ID 3282, SEQ ID 3284, SEQ ID 3285, SEQ ID 3286, SEQ ID 3287, SEQ ID 3288, SEQ ID 3289, SEQ ID 3291, SEQ ID 3292, SEQ ID 3293, SEQ ID 3294, SEQ ID 3295, SEQ ID 3296, SEQ ID 3297, SEQ ID 3298, SEQ ID 3299, SEQ ID 3300, SEQ ID 3301, SEQ ID 3302, SEQ ID 3303, SEQ ID 3304, SEQ ID 3305, SEQ ID 3306, SEQ ID 3307, SEQ ID 3308, SEQ ID 3309, SEQ ID 3310, SEQ ID 3311, SEQ ID 3312, SEQ ID 3313, SEQ ID 3314, SEQ ID 3315, SEQ ID 3316, SEQ ID 3317, SEQ ID 3318, SEQ ID 3320, SEQ ID 3321, SEQ ID 3322, SEQ ID 3323, SEQ ID 3324, SEQ ID 3325, SEQ ID 3326, SEQ ID 3327, SEQ ID 3329, SEQ ID 3331, SEQ ID 3332, SEQ ID 3333, SEQ ID 3334, SEQ ID 3335, SEQ ID 3336, SEQ ID 3337, SEQ ID 3338, SEQ ID 3339, SEQ ID 3340, SEQ ID 3342, SEQ ID 3343, SEQ ID 3344, SEQ ID 3345, SEQ ID 3346, SEQ ID 3347, SEQ ID 3348, SEQ ID 3349, SEQ ID 3350, SEQ ID 3351, SEQ ID 3352, SEQ ID 3353, SEQ ID 3354, SEQ ID 3355, SEQ ID 3356, SEQ ID 3357, SEQ ID 3358, SEQ ID 3359, SEQ ID 3360, SEQ ID 3361, SEQ ID 3362, SEQ ID 3363, SEQ ID 3364, SEQ ID 3365, SEQ ID 3366, SEQ ID 3367, SEQ ID 3368, SEQ ID 3369, SEQ ID 3370, SEQ ID 3371, SEQ ID 3390, SEQ ID 3391, SEQ ID 3392, SEQ ID 3393, SEQ ID 3394, SEQ ID 3395, SEQ ID 3396, SEQ ID 3397, SEQ ID 3398, SEQ ID 3399, SEQ ID 3400, SEQ ID 3401, SEQ ID 3402, SEQ ID 3403, SEQ ID 3404, SEQ ID 3405, SEQ ID 3406, SEQ ID 3407, SEQ ID 3408, SEQ ID 3409, SEQ ID 3410, SEQ ID 3411, SEQ ID 3412, SEQ ID 3413, SEQ ID 3414, SEQ ID 3415, SEQ ID 3416, SEQ ID 3417, SEQ ID 3418, SEQ ID 3419, SEQ ID 3420, SEQ ID 3421, SEQ ID 3422, SEQ ID 3423, SEQ ID 3424, SEQ ID 3425, SEQ ID 3426, SEQ ID 3427, SEQ ID 3428, SEQ ID 3429, SEQ ID 3430, SEQ ID 3431, SEQ ID 3432, SEQ ID 3433, SEQ ID 3434, SEQ ID 3435, SEQ ID 3436, SEQ ID 3437, SEQ ID 3438, SEQ ID 3439, SEQ ID 3440, SEQ ID 3441, SEQ ID 3442, SEQ ID 3443, SEQ ID 3444, SEQ ID 3445, SEQ ID 3446, SEQ ID 3447, SEQ ID 3448, SEQ ID 3449, SEQ ID 3450, SEQ ID 3451, SEQ ID 3452, SEQ ID 3453, SEQ ID 3454, SEQ ID 3460, SEQ ID 3461, SEQ ID 3464, SEQ ID 3465, SEQ ID 3466, SEQ ID 3467, SEQ ID 3468, SEQ ID 3486, SEQ ID 3487, SEQ ID 3488, SEQ ID 3489, SEQ ID 3490, SEQ ID 3491, SEQ ID 3493, SEQ ID 3494, SEQ ID 3496, SEQ ID 3497, SEQ ID 3501, SEQ ID 3505, SEQ ID 3508, SEQ ID 3511, SEQ ID 3512, SEQ ID 3516, SEQ ID 3517, SEQ ID 3518, SEQ ID 3521, SEQ ID 3522, SEQ ID 3523, SEQ ID 3524, SEQ ID 3525, SEQ ID 3526, SEQ ID 3527, SEQ ID 3528, SEQ ID 3530, SEQ ID 3531, SEQ ID 3532, SEQ ID 3534, SEQ ID 3535, SEQ ID 3536, SEQ ID 3538, SEQ ID 3539, SEQ ID 3541, SEQ ID 3542, SEQ ID 3543, SEQ ID 3544, SEQ ID 3546, SEQ ID 3548, SEQ ID 3549, SEQ ID 3550, SEQ ID 3552, SEQ ID 3556, SEQ ID 3557, SEQ ID 3558, SEQ ID 3560, SEQ ID 3561, SEQ ID 3566, SEQ ID 3567, SEQ ID 3568, SEQ ID 3569, SEQ ID 3571, SEQ ID 3572, SEQ ID 3573, SEQ ID 3574, SEQ ID 3576, SEQ ID 3577, SEQ ID 3578, SEQ ID 3580, SEQ ID 3581, SEQ ID 3584, SEQ ID 3585, SEQ ID 3586, SEQ ID 3588, SEQ ID 3590, SEQ ID 3592, SEQ ID 3594, SEQ ID 3595, SEQ ID 3598, SEQ ID 3599, SEQ ID 3600, SEQ ID 3601, SEQ ID 3602, SEQ ID 3603, SEQ ID 3605, SEQ ID 3607, SEQ ID 3609, SEQ ID 3610, SEQ ID 3613, SEQ ID 3614, SEQ ID 3615, SEQ ID 3616, SEQ ID 3617, SEQ ID 3621, SEQ ID 3623, SEQ ID 3624, SEQ ID 3625, SEQ ID 3626, SEQ ID 3627, SEQ ID 3628, SEQ ID 3629, SEQ ID 3630, SEQ ID 3631, SEQ ID 3632, SEQ ID 3633, SEQ ID 3636, SEQ ID 3637, SEQ ID 3638, SEQ ID 3639, SEQ ID 3641, SEQ ID 3642, SEQ ID 3643, SEQ ID 3645, SEQ ID 3647, SEQ ID 3648, SEQ ID 3649, SEQ ID 3651, SEQ ID 3654, SEQ ID 3656, SEQ ID 3659, SEQ ID 3660, SEQ ID 3661, SEQ ID 3663, SEQ ID 3664, SEQ ID 3665, SEQ ID 3666, SEQ ID 3670, SEQ ID 3672, SEQ ID 3676, SEQ ID 3678, SEQ ID 3679, SEQ ID 3680, SEQ ID 3681, SEQ ID 3682, SEQ ID 3683, SEQ ID 3684, SEQ ID 3685, SEQ ID 3686, SEQ ID 3687, SEQ ID 3688, SEQ ID 3689, SEQ ID 3690, SEQ ID 3691, SEQ ID 3692, SEQ ID 3693, SEQ ID 3694, SEQ ID 3695, SEQ ID 3696, SEQ ID 3697, SEQ ID 3698, SEQ ID 3699, SEQ ID 3700, SEQ ID 3701, SEQ ID 3702, SEQ ID 3703, SEQ ID 3704, SEQ ID 3705, SEQ ID 3706, SEQ ID 3707, SEQ ID 3708, SEQ ID 3709, SEQ ID 3710, SEQ ID 3711, SEQ ID 3712, SEQ ID 3713, SEQ ID 3714, SEQ ID 3715, SEQ ID 3716, SEQ ID 3717, SEQ ID 3718, SEQ ID 3719, SEQ ID 3720, SEQ ID 3721, SEQ ID 3722, SEQ ID 3723, SEQ ID 3724, SEQ ID 3725, SEQ ID 3726, SEQ ID 3727, SEQ ID 3729, SEQ ID 3730, SEQ ID 3731, SEQ ID 3732, SEQ ID 3733, SEQ ID 3734, SEQ ID 3735, SEQ ID 3736, SEQ ID 3737, SEQ ID 3738, SEQ ID 3739, SEQ ID 3740, SEQ ID 3741, SEQ ID 3742, SEQ ID 3743, SEQ ID 3744, SEQ ID 3745, SEQ ID 3746, SEQ ID 3747, SEQ ID 3748, SEQ ID 3749, SEQ ID 3750, SEQ ID 3751, SEQ ID 3752, SEQ ID 3753, SEQ ID 3754, SEQ ID 3755, SEQ ID 3774, SEQ ID 3775, SEQ ID 3776, SEQ ID 3777, SEQ ID 3778, SEQ ID 3779, SEQ ID 3780, SEQ ID 3781, SEQ ID 3782, SEQ ID 3783, SEQ ID 3784, SEQ ID 3785, SEQ ID 3786, SEQ ID 3787, SEQ ID 3788, SEQ ID 3789, SEQ ID 3790, SEQ ID 3791, SEQ ID 3792, SEQ ID 3793, SEQ ID 3794, SEQ ID 3795, SEQ ID 3796, SEQ ID 3797, SEQ ID 3798, SEQ ID 3799, SEQ ID 3800, SEQ ID 3801, SEQ ID 3802, SEQ ID 3803, SEQ ID 3804, SEQ ID 3805, SEQ ID 3806, SEQ ID 3807, SEQ ID 3808, SEQ ID 3809, SEQ ID 3810, SEQ ID 3811, SEQ ID 3812, SEQ ID 3813, SEQ ID 3814, SEQ ID 3815, SEQ ID 3816, SEQ ID 3817, SEQ ID 3818, SEQ ID 3819, SEQ ID 3820, SEQ ID 3821, SEQ ID 3822, SEQ ID 3823, SEQ ID 3824, SEQ ID 3825, SEQ ID 3826, SEQ ID 3827, SEQ ID 3828, SEQ ID 3829, SEQ ID 3830, SEQ ID 3831, SEQ ID 3832, SEQ ID 3833, SEQ ID 3834, SEQ ID 3835, SEQ ID 3836, SEQ ID 3837, SEQ ID 3838, SEQ ID 3839, SEQ ID 3840, SEQ ID 3841, SEQ ID 3842, SEQ ID 3844, SEQ ID 3848, SEQ ID 3850, SEQ ID 3851, SEQ ID 3852, SEQ ID 3853, SEQ ID 3867, SEQ ID 3868, SEQ ID 3869, SEQ ID 3870, SEQ ID 3871, SEQ ID 3872, SEQ ID 3873, SEQ ID 3874, SEQ ID 3875, SEQ ID 3876, SEQ ID 3877, SEQ ID 3878, SEQ ID 3879, SEQ ID 3880, SEQ ID 3881, SEQ ID 3882, SEQ ID 3883, SEQ ID 3884, SEQ ID 3885, SEQ ID 3886, SEQ ID 3887, SEQ ID 3888, SEQ ID 3889, SEQ ID 3890, SEQ ID 3891, SEQ ID 3892, SEQ ID 3893, SEQ ID 3894, SEQ ID 3895, SEQ ID 3896, SEQ ID 3897, SEQ ID 3898, SEQ ID 3899, SEQ ID 3900, SEQ ID 3901, SEQ ID 3902, SEQ ID 3903, SEQ ID 3904, SEQ ID 3905, SEQ ID 3906, SEQ ID 3907, SEQ ID 3908, SEQ ID 3909, SEQ ID 3910, SEQ ID 3911, SEQ ID 3912, SEQ ID 3913, SEQ ID 3914, SEQ ID 3915, SEQ ID 3916, SEQ ID 3917, SEQ ID 3918, SEQ ID 3919, SEQ ID 3920, SEQ ID 3921, SEQ ID 3922, SEQ ID 3923, SEQ ID 3924, SEQ ID 3925, SEQ ID 3926, SEQ ID 3927, SEQ ID 3928, SEQ ID 3929, SEQ ID 3930, SEQ ID 3931, SEQ ID 3932, SEQ ID 3933, SEQ ID 3934, SEQ ID 3935, SEQ ID 3936, SEQ ID 3937, SEQ ID 3938, SEQ ID 3939, SEQ ID 3940, SEQ ID 3941, SEQ ID 3942, SEQ ID 3943, SEQ ID 3944, SEQ ID 3945, SEQ ID 3946, SEQ ID 3947, and SEQ ID 3948.

24. The antisense oligonucleotide progranulin agonist according to claim 22, wherein the contiguous nucleotide sequence is complementary to a sequence selected from the group consisting of SEQ ID 2321, SEQ ID 2335, SEQ ID 2336, SEQ ID 2337, SEQ ID 2338, SEQ ID 2339, SEQ ID 2348, SEQ ID 2349, SEQ ID 2351, SEQ ID 2352, SEQ ID 2353, SEQ ID 2354, SEQ ID 2355, SEQ ID 2358, SEQ ID 2360, SEQ ID 2364, SEQ ID 2365, SEQ ID 2366, SEQ ID 2367, SEQ ID 2369, SEQ ID 2371, SEQ ID 2373, SEQ ID 2375, SEQ ID 2386, SEQ ID 2387, SEQ ID 2388, SEQ ID 2389, SEQ ID 2394, SEQ ID 2403, SEQ ID 2426, SEQ ID 2428, SEQ ID 2429, SEQ ID 2430, SEQ ID 2431, SEQ ID 2432, SEQ ID 2435, SEQ ID 2440, SEQ ID 2441, SEQ ID 2442, SEQ ID 2444, SEQ ID 2446, SEQ ID 2447, SEQ ID 2450, SEQ ID 2451, SEQ ID 2452, SEQ ID 2453, SEQ ID 2454, SEQ ID 2455, SEQ ID 2456, SEQ ID 2458, SEQ ID 2459, SEQ ID 2461, SEQ ID 2463, SEQ ID 2464, SEQ ID 2465, SEQ ID 2466, SEQ ID 2467, SEQ ID 2468, SEQ ID 2469, SEQ ID 2470, SEQ ID 2471, SEQ ID 2472, SEQ ID 2473, SEQ ID 2474, SEQ ID 2475, SEQ ID 2476, SEQ ID 2477, SEQ ID 2478, SEQ ID 2482, SEQ ID 2483, SEQ ID 2484, SEQ ID 2485, SEQ ID 2487, SEQ ID 2489, SEQ ID 2494, SEQ ID 2495, SEQ ID 2496, SEQ ID 2497, SEQ ID 2499, SEQ ID 2501, SEQ ID 2502, SEQ ID 2504, SEQ ID 2506, SEQ ID 2507, SEQ ID 2508, SEQ ID 2509, SEQ ID 2511, SEQ ID 2513, SEQ ID 2515, SEQ ID 2516, SEQ ID 2518, SEQ ID 2519, SEQ ID 2520, SEQ ID 2521, SEQ ID 2523, SEQ ID 2525, SEQ ID 2534, SEQ ID 2537, SEQ ID 2544, SEQ ID 2546, SEQ ID 2554, SEQ ID 2555, SEQ ID 2556, SEQ ID 2560, SEQ ID 2561, SEQ ID 2562, SEQ ID 2595, SEQ ID 2626, SEQ ID 2628, SEQ ID 2629, SEQ ID 2630, SEQ ID 2631, SEQ ID 2633, SEQ ID 2638, SEQ ID 2639, SEQ ID 2640, SEQ ID 2649, SEQ ID 2651, SEQ ID 2652, SEQ ID 2655, SEQ ID 2658, SEQ ID 2665, SEQ ID 2666, SEQ ID 2667, SEQ ID 2669, SEQ ID 2670, SEQ ID 2676, SEQ ID 2677, SEQ ID 2678, SEQ ID 2679, SEQ ID 2682, SEQ ID 2686, SEQ ID 2688, SEQ ID 2689, SEQ ID 2691, SEQ ID 2694, SEQ ID 2698, SEQ ID 2699, SEQ ID 2700, SEQ ID 2701, SEQ ID 2703, SEQ ID 2706, SEQ ID 2709, SEQ ID 2711, SEQ ID 2712, SEQ ID 2713, SEQ ID 2714, SEQ ID 2719, SEQ ID 2720, SEQ ID 2721, SEQ ID 2737, SEQ ID 2739, SEQ ID 2740, SEQ ID 2741, SEQ ID 2742, SEQ ID 2743, SEQ ID 2744, SEQ ID 2745, SEQ ID 2746, SEQ ID 2747, SEQ ID 2748, SEQ ID 2749, SEQ ID 2750, SEQ ID 2751, SEQ ID 2752, SEQ ID 2753, SEQ ID 2754, SEQ ID 2755, SEQ ID 2756, SEQ ID 2757, SEQ ID 2758, SEQ ID 2760, SEQ ID 2763, SEQ ID 2764, SEQ ID 2765, SEQ ID 2766, SEQ ID 2767, SEQ ID 2768, SEQ ID 2769, SEQ ID 2770, SEQ ID 2771, SEQ ID 2772, SEQ ID 2774, SEQ ID 2816, SEQ ID 2817, SEQ ID 2818, SEQ ID 2819, SEQ ID 2820, SEQ ID 2824, SEQ ID 2828, SEQ ID 2829, SEQ ID 2830, SEQ ID 2831, SEQ ID 2832, SEQ ID 2833, SEQ ID 2834, SEQ ID 2835, SEQ ID 2836, SEQ ID 2837, SEQ ID 2851, SEQ ID 2852, SEQ ID 2866, SEQ ID 2871, SEQ ID 2872, SEQ ID 2886, SEQ ID 2887, SEQ ID 2890, SEQ ID 2891, SEQ ID 2892, SEQ ID 2895, SEQ ID 2896, SEQ ID 2899, SEQ ID 2904, SEQ ID 2910, SEQ ID 2911, SEQ ID 2912, SEQ ID 2913, SEQ ID 2914, SEQ ID 2916, SEQ ID 2918, SEQ ID 2919, SEQ ID 2920, SEQ ID 2922, SEQ ID 2925, SEQ ID 2926, SEQ ID 2932, SEQ ID 2939, SEQ ID 2941, SEQ ID 2942, SEQ ID 2943, SEQ ID 2972, SEQ ID 2973, SEQ ID 2974, SEQ ID 2975, SEQ ID 2976, SEQ ID 2977, SEQ ID 2980, SEQ ID 2983, SEQ ID 2985, SEQ ID 3053, SEQ ID 3054, SEQ ID 3055, SEQ ID 3056, SEQ ID 3058, SEQ ID 3059, SEQ ID 3060, SEQ ID 3061, SEQ ID 3062, SEQ ID 3063, SEQ ID 3064, SEQ ID 3065, SEQ ID 3066, SEQ ID 3068, SEQ ID 3069, SEQ ID 3070, SEQ ID 3071, SEQ ID 3072, SEQ ID 3073, SEQ ID 3074, SEQ ID 3075, SEQ ID 3076, SEQ ID 3077, SEQ ID 3078, SEQ ID 3079, SEQ ID 3082, SEQ ID 3083, SEQ ID 3084, SEQ ID 3085, SEQ ID 3088, SEQ ID 3089, SEQ ID 3090, SEQ ID 3091, SEQ ID 3092, SEQ ID 3095, SEQ ID 3097, SEQ ID 3102, SEQ ID 3106, SEQ ID 3108, SEQ ID 3110, SEQ ID 3116, SEQ ID 3120, SEQ ID 3121, SEQ ID 3125, SEQ ID 3126, SEQ ID 3133, SEQ ID 3134, SEQ ID 3135, SEQ ID 3137, SEQ ID 3138, SEQ ID 3140, SEQ ID 3141, SEQ ID 3142, SEQ ID 3143, SEQ ID 3145, SEQ ID 3148, SEQ ID 3152, SEQ ID 3153, SEQ ID 3156, SEQ ID 3157, SEQ ID 3158, SEQ ID 3159, SEQ ID 3160, SEQ ID 3161, SEQ ID 3162, SEQ ID 3163, SEQ ID 3164, SEQ ID 3165, SEQ ID 3166, SEQ ID 3167, SEQ ID 3168, SEQ ID 3169, SEQ ID 3170, SEQ ID 3172, SEQ ID 3173, SEQ ID 3174, SEQ ID 3175, SEQ ID 3176, SEQ ID 3177, SEQ ID 3178, SEQ ID 3179, SEQ ID 3180, SEQ ID 3181, SEQ ID 3182, SEQ ID 3183, SEQ ID 3184, SEQ ID 3186, SEQ ID 3188, SEQ ID 3191, SEQ ID 3193, SEQ ID 3196, SEQ ID 3197, SEQ ID 3203, SEQ ID 3205, SEQ ID 3206, SEQ ID 3207, SEQ ID 3210, SEQ ID 3211, SEQ ID 3212, SEQ ID 3213, SEQ ID 3214, SEQ ID 3215, SEQ ID 3216, SEQ ID 3217, SEQ ID 3218, SEQ ID 3219, SEQ ID 3221, SEQ ID 3222, SEQ ID 3223, SEQ ID 3224, SEQ ID 3227, SEQ ID 3236, SEQ ID 3237, SEQ ID 3238, SEQ ID 3239, SEQ ID 3240, SEQ ID 3241, SEQ ID 3242, SEQ ID 3243, SEQ ID 3244, SEQ ID 3245, SEQ ID 3246, SEQ ID 3248, SEQ ID 3249, SEQ ID 3250, SEQ ID 3251, SEQ ID 3252, SEQ ID 3254, SEQ ID 3258, SEQ ID 3259, SEQ ID 3261, SEQ ID 3263, SEQ ID 3265, SEQ ID 3266, SEQ ID 3267, SEQ ID 3271, SEQ ID 3272, SEQ ID 3273, SEQ ID 3276, SEQ ID 3277, SEQ ID 3279, SEQ ID 3286, SEQ ID 3295, SEQ ID 3297, SEQ ID 3305, SEQ ID 3307, SEQ ID 3309, SEQ ID 3312, SEQ ID 3313, SEQ ID 3314, SEQ ID 3316, SEQ ID 3317, SEQ ID 3318, SEQ ID 3320, SEQ ID 3332, SEQ ID 3335, SEQ ID 3336, SEQ ID 3337, SEQ ID 3338, SEQ ID 3339, SEQ ID 3340, SEQ ID 3342, SEQ ID 3343, SEQ ID 3345, SEQ ID 3346, SEQ ID 3347, SEQ ID 3348, SEQ ID 3349, SEQ ID 3350, SEQ ID 3351, SEQ ID 3352, SEQ ID 3353, SEQ ID 3354, SEQ ID 3355, SEQ ID 3356, SEQ ID 3359, SEQ ID 3360, SEQ ID 3361, SEQ ID 3362, SEQ ID 3363, SEQ ID 3364, SEQ ID 3365, SEQ ID 3366, SEQ ID 3369, SEQ ID 3370, SEQ ID 3390, SEQ ID 3392, SEQ ID 3393, SEQ ID 3394, SEQ ID 3395, SEQ ID 3396, SEQ ID 3397, SEQ ID 3398, SEQ ID 3399, SEQ ID 3401, SEQ ID 3403, SEQ ID 3404, SEQ ID 3407, SEQ ID 3408, SEQ ID 3409, SEQ ID 3410, SEQ ID 3411, SEQ ID 3412, SEQ ID 3413, SEQ ID 3414, SEQ ID 3415, SEQ ID 3417, SEQ ID 3419, SEQ ID 3420, SEQ ID 3422, SEQ ID 3423, SEQ ID 3424, SEQ ID 3428, SEQ ID 3429, SEQ ID 3430, SEQ ID 3432, SEQ ID 3433, SEQ ID 3434, SEQ ID 3435, SEQ ID 3436, SEQ ID 3437, SEQ ID 3439, SEQ ID 3440, SEQ ID 3441, SEQ ID 3442, SEQ ID 3443, SEQ ID 3444, SEQ ID 3445, SEQ ID 3446, SEQ ID 3447, SEQ ID 3448, SEQ ID 3449, SEQ ID 3450, SEQ ID 3451, SEQ ID 3452, SEQ ID 3460, SEQ ID 3461, SEQ ID 3466, SEQ ID 3467, SEQ ID 3468, SEQ ID 3490, SEQ ID 3494, SEQ ID 3496, SEQ ID 3501, SEQ ID 3505, SEQ ID 3511, SEQ ID 3512, SEQ ID 3516, SEQ ID 3517, SEQ ID 3521, SEQ ID 3522, SEQ ID 3556, SEQ ID 3557, SEQ ID 3561, SEQ ID 3566, SEQ ID 3567, SEQ ID 3568, SEQ ID 3569, SEQ ID 3571, SEQ ID 3572, SEQ ID 3576, SEQ ID 3578, SEQ ID 3580, SEQ ID 3584, SEQ ID 3594, SEQ ID 3613, SEQ ID 3614, SEQ ID 3624, SEQ ID 3625, SEQ ID 3626, SEQ ID 3627, SEQ ID 3628, SEQ ID 3633, SEQ ID 3641, SEQ ID 3643, SEQ ID 3648, SEQ ID 3651, SEQ ID 3654, SEQ ID 3656, SEQ ID 3659, SEQ ID 3660, SEQ ID 3661, SEQ ID 3670, SEQ ID 3676, SEQ ID 3680, SEQ ID 3681, SEQ ID 3683, SEQ ID 3684, SEQ ID 3685, SEQ ID 3686, SEQ ID 3687, SEQ ID 3688, SEQ ID 3689, SEQ ID 3691, SEQ ID 3693, SEQ ID 3694, SEQ ID 3695, SEQ ID 3696, SEQ ID 3698, SEQ ID 3700, SEQ ID 3701, SEQ ID 3703, SEQ ID 3704, SEQ ID 3707, SEQ ID 3708, SEQ ID 3709, SEQ ID 3710, SEQ ID 3711, SEQ ID 3712, SEQ ID 3713, SEQ ID 3714, SEQ ID 3715, SEQ ID 3716, SEQ ID 3717, SEQ ID 3718, SEQ ID 3719, SEQ ID 3720, SEQ ID 3721, SEQ ID 3722, SEQ ID 3723, SEQ ID 3725, SEQ ID 3744, SEQ ID 3747, SEQ ID 3748, SEQ ID 3749, SEQ ID 3750, SEQ ID 3751, SEQ ID 3752, SEQ ID 3753, SEQ ID 3754, SEQ ID 3755, SEQ ID 3774, SEQ ID 3775, SEQ ID 3776, SEQ ID 3786, SEQ ID 3788, SEQ ID 3790, SEQ ID 3791, SEQ ID 3793, SEQ ID 3794, SEQ ID 3795, SEQ ID 3796, SEQ ID 3797, SEQ ID 3798, SEQ ID 3799, SEQ ID 3800, SEQ ID 3801, SEQ ID 3802, SEQ ID 3803, SEQ ID 3804, SEQ ID 3805, SEQ ID 3809, SEQ ID 3810, SEQ ID 3811, SEQ ID 3812, SEQ ID 3813, SEQ ID 3814, SEQ ID 3815, SEQ ID 3821, SEQ ID 3822, SEQ ID 3823, SEQ ID 3824, SEQ ID 3825, SEQ ID 3826, SEQ ID 3827, SEQ ID 3828, SEQ ID 3830, SEQ ID 3831, SEQ ID 3832, SEQ ID 3834, SEQ ID 3836, SEQ ID 3837, SEQ ID 3838, SEQ ID 3839, SEQ ID 3840, SEQ ID 3841, SEQ ID 3842, SEQ ID 3844, SEQ ID 3850, SEQ ID 3852, SEQ ID 3867, SEQ ID 3868, SEQ ID 3870, SEQ ID 3871, SEQ ID 3872, SEQ ID 3873, SEQ ID 3874, SEQ ID 3875, SEQ ID 3876, SEQ ID 3879, SEQ ID 3880, SEQ ID 3881, SEQ ID 3882, SEQ ID 3883, SEQ ID 3884, SEQ ID 3885, SEQ ID 3886, SEQ ID 3887, SEQ ID 3888, SEQ ID 3889, SEQ ID 3890, SEQ ID 3891, SEQ ID 3892, SEQ ID 3893, SEQ ID 3894, SEQ ID 3895, SEQ ID 3896, SEQ ID 3897, SEQ ID 3908, SEQ ID 3909, SEQ ID 3910, SEQ ID 3911, SEQ ID 3912, SEQ ID 3913, SEQ ID 3922, SEQ ID 3923, SEQ ID 3930, SEQ ID 3935, SEQ ID 3936, SEQ ID 3937, SEQ ID 3938, SEQ ID 3939, SEQ ID 3940, SEQ ID 3944, SEQ ID 3945, SEQ ID 3946, SEQ ID 3947, and SEQ ID 3948.

25. The antisense oligonucleotide progranulin agonist according to any one of claims 22-24, wherein the antisense oligonucleotide progranulin agonist is selected from the group consisting of SEQ ID NOs 693-2039.

26. The antisense oligonucleotide progranulin agonist according to any one of claims 22-25, wherein the antisense oligonucleotide progranulin agonist is selected from the group consisting of SEQ ID 693, SEQ ID 694, SEQ ID 696, SEQ ID 700, SEQ ID 701, SEQ ID 703, SEQ ID 706, SEQ ID 707, SEQ ID 708, SEQ ID 709, SEQ ID 710, SEQ ID 711, SEQ ID 712, SEQ ID 713, SEQ ID 714, SEQ ID 717, SEQ ID 718, SEQ ID 719, SEQ ID 720, SEQ ID 721, SEQ ID 722, SEQ ID 723, SEQ ID 724, SEQ ID 725, SEQ ID 726, SEQ ID 727, SEQ ID 728, SEQ ID 729, SEQ ID 730, SEQ ID 731, SEQ ID 732, SEQ ID 733, SEQ ID 734, SEQ ID 736, SEQ ID 737, SEQ ID 738, SEQ ID 739, SEQ ID 740, SEQ ID 741, SEQ ID 742, SEQ ID 743, SEQ ID 744, SEQ ID 745, SEQ ID 746, SEQ ID 747, SEQ ID 748, SEQ ID 749, SEQ ID 750, SEQ ID 751, SEQ ID 752, SEQ ID 753, SEQ ID 756, SEQ ID 758, SEQ ID 759, SEQ ID 760, SEQ ID 761, SEQ ID 762, SEQ ID 764, SEQ ID 765, SEQ ID 766, SEQ ID 767, SEQ ID 768, SEQ ID 769, SEQ ID 770, SEQ ID 771, SEQ ID 772, SEQ ID 773, SEQ ID 775, SEQ ID 776, SEQ ID 777, SEQ ID 778, SEQ ID 779, SEQ ID 780, SEQ ID 782, SEQ ID 783, SEQ ID 785, SEQ ID 786, SEQ ID 787, SEQ ID 788, SEQ ID 790, SEQ ID 791, SEQ ID 793, SEQ ID 796, SEQ ID 797, SEQ ID 798, SEQ ID 799, SEQ ID 800, SEQ ID 801, SEQ ID 802, SEQ ID 803, SEQ ID 804, SEQ ID 805, SEQ ID 806, SEQ ID 807, SEQ ID 808, SEQ ID 809, SEQ ID 810, SEQ ID 811, SEQ ID 812, SEQ ID 813, SEQ ID 814, SEQ ID 815, SEQ ID 816, SEQ ID 817, SEQ ID 818, SEQ ID 819, SEQ ID 820, SEQ ID 821, SEQ ID 822, SEQ ID 823, SEQ ID 824, SEQ ID 825, SEQ ID 826, SEQ ID 827, SEQ ID 828, SEQ ID 829, SEQ ID 830, SEQ ID 831, SEQ ID 832, SEQ ID 833, SEQ ID 834, SEQ ID 835, SEQ ID 836, SEQ ID 837, SEQ ID 838, SEQ ID 839, SEQ ID 840, SEQ ID 841, SEQ ID 842, SEQ ID 843, SEQ ID 844, SEQ ID 845, SEQ ID 846, SEQ ID 847, SEQ ID 848, SEQ ID 849, SEQ ID 850, SEQ ID 851, SEQ ID 853, SEQ ID 854, SEQ ID 855, SEQ ID 856, SEQ ID 857, SEQ ID 859, SEQ ID 861, SEQ ID 862, SEQ ID 863, SEQ ID 864, SEQ ID 865, SEQ ID 866, SEQ ID 867, SEQ ID 868, SEQ ID 869, SEQ ID 870, SEQ ID 871, SEQ ID 873, SEQ ID 874, SEQ ID 875, SEQ ID 876, SEQ ID 877, SEQ ID 878, SEQ ID 879, SEQ ID 880, SEQ ID 881, SEQ ID 882, SEQ ID 883, SEQ ID 884, SEQ ID 885, SEQ ID 886, SEQ ID 887, SEQ ID 888, SEQ ID 890, SEQ ID 891, SEQ ID 892, SEQ ID 893, SEQ ID 894, SEQ ID 895, SEQ ID 896, SEQ ID 897, SEQ ID 898, SEQ ID 899, SEQ ID 900, SEQ ID 903, SEQ ID 905, SEQ ID 906, SEQ ID 907, SEQ ID 908, SEQ ID 909, SEQ ID 910, SEQ ID 912, SEQ ID 913, SEQ ID 914, SEQ ID 916, SEQ ID 918, SEQ ID 919, SEQ ID 921, SEQ ID 922, SEQ ID 923, SEQ ID 925, SEQ ID 926, SEQ ID 927, SEQ ID 928, SEQ ID 929, SEQ ID 932, SEQ ID 933, SEQ ID 934, SEQ ID 935, SEQ ID 937, SEQ ID 938, SEQ ID 939, SEQ ID 944, SEQ ID 945, SEQ ID 946, SEQ ID 947, SEQ ID 948, SEQ ID 949, SEQ ID 950, SEQ ID 951, SEQ ID 952, SEQ ID 953, SEQ ID 954, SEQ ID 955, SEQ ID 956, SEQ ID 957, SEQ ID 958, SEQ ID 960, SEQ ID 961, SEQ ID 962, SEQ ID 963, SEQ ID 964, SEQ ID 965, SEQ ID 966, SEQ ID 967, SEQ ID 968, SEQ ID 969, SEQ ID 970, SEQ ID 971, SEQ ID 973, SEQ ID 974, SEQ ID 975, SEQ ID 976, SEQ ID 978, SEQ ID 982, SEQ ID 985, SEQ ID 986, SEQ ID 987, SEQ ID 991, SEQ ID 994, SEQ ID 995, SEQ ID 996, SEQ ID 997, SEQ ID 998, SEQ ID 999, SEQ ID 1000, SEQ ID 1001, SEQ ID 1002, SEQ ID 1003, SEQ ID 1004, SEQ ID 1005, SEQ ID 1006, SEQ ID 1007, SEQ ID 1008, SEQ ID 1009, SEQ ID 1010, SEQ ID 1011, SEQ ID 1012, SEQ ID 1013, SEQ ID 1014, SEQ ID 1015, SEQ ID 1016, SEQ ID 1017, SEQ ID 1018, SEQ ID 1019, SEQ ID 1020, SEQ ID 1021, SEQ ID 1022, SEQ ID 1023, SEQ ID 1024, SEQ ID 1025, SEQ ID 1026, SEQ ID 1027, SEQ ID 1028, SEQ ID 1030, SEQ ID 1031, SEQ ID 1032, SEQ ID 1033, SEQ ID 1034, SEQ ID 1035, SEQ ID 1036, SEQ ID 1037, SEQ ID 1038, SEQ ID 1039, SEQ ID 1040, SEQ ID 1041, SEQ ID 1042, SEQ ID 1043, SEQ ID 1044, SEQ ID 1045, SEQ ID 1046, SEQ ID 1047, SEQ ID 1048, SEQ ID 1049, SEQ ID 1050, SEQ ID 1051, SEQ ID 1052, SEQ ID 1053, SEQ ID 1054, SEQ ID 1055, SEQ ID 1056, SEQ ID 1057, SEQ ID 1058, SEQ ID 1059, SEQ ID 1060, SEQ ID 1061, SEQ ID 1062, SEQ ID 1063, SEQ ID 1065, SEQ ID 1066, SEQ ID 1067, SEQ ID 1068, SEQ ID 1069, SEQ ID 1070, SEQ ID 1071, SEQ ID 1072, SEQ ID 1073, SEQ ID 1074, SEQ ID 1075, SEQ ID 1076, SEQ ID 1077, SEQ ID 1078, SEQ ID 1079, SEQ ID 1080, SEQ ID 1081, SEQ ID 1082, SEQ ID 1083, SEQ ID 1084, SEQ ID 1085, SEQ ID 1086, SEQ ID 1087, SEQ ID 1088, SEQ ID 1089, SEQ ID 1090, SEQ ID 1091, SEQ ID 1092, SEQ ID 1093, SEQ ID 1094, SEQ ID 1095, SEQ ID 1098, SEQ ID 1099, SEQ ID 1100, SEQ ID 1101, SEQ ID 1102, SEQ ID 1105, SEQ ID 1106, SEQ ID 1107, SEQ ID 1108, SEQ ID 1109, SEQ ID 1110, SEQ ID 1111, SEQ ID 1112, SEQ ID 1113, SEQ ID 1114, SEQ ID 1115, SEQ ID 1116, SEQ ID 1117, SEQ ID 1118, SEQ ID 1119, SEQ ID 1120, SEQ ID 1121, SEQ ID 1122, SEQ ID 1123, SEQ ID 1124, SEQ ID 1125, SEQ ID 1126, SEQ ID 1127, SEQ ID 1128, SEQ ID 1129, SEQ ID 1130, SEQ ID 1131, SEQ ID 1132, SEQ ID 1133, SEQ ID 1134, SEQ ID 1135, SEQ ID 1136, SEQ ID 1137, SEQ ID 1138, SEQ ID 1139, SEQ ID 1140, SEQ ID 1141, SEQ ID 1142, SEQ ID 1143, SEQ ID 1144, SEQ ID 1145, SEQ ID 1146, SEQ ID 1147, SEQ ID 1187, SEQ ID 1188, SEQ ID 1189, SEQ ID 1190, SEQ ID 1191, SEQ ID 1192, SEQ ID 1193, SEQ ID 1194, SEQ ID 1195, SEQ ID 1196, SEQ ID 1197, SEQ ID 1198, SEQ ID 1199, SEQ ID 1200, SEQ ID 1201, SEQ ID 1202, SEQ ID 1203, SEQ ID 1204, SEQ ID 1205, SEQ ID 1206, SEQ ID 1207, SEQ ID 1208, SEQ ID 1209, SEQ ID 1210, SEQ ID 1211, SEQ ID 1212, SEQ ID 1213, SEQ ID 1214, SEQ ID 1215, SEQ ID 1216, SEQ ID 1217, SEQ ID 1219, SEQ ID 1220, SEQ ID 1221, SEQ ID 1222, SEQ ID 1223, SEQ ID 1224, SEQ ID 1225, SEQ ID 1226, SEQ ID 1227, SEQ ID 1230, SEQ ID 1231, SEQ ID 1232, SEQ ID 1233, SEQ ID 1234, SEQ ID 1235, SEQ ID 1236, SEQ ID 1237, SEQ ID 1238, SEQ ID 1239, SEQ ID 1240, SEQ ID 1241, SEQ ID 1242, SEQ ID 1243, SEQ ID 1244, SEQ ID 1245, SEQ ID 1246, SEQ ID 1247, SEQ ID 1248, SEQ ID 1250, SEQ ID 1251, SEQ ID 1252, SEQ ID 1253, SEQ ID 1254, SEQ ID 1255, SEQ ID 1256, SEQ ID 1257, SEQ ID 1258, SEQ ID 1259, SEQ ID 1260, SEQ ID 1261, SEQ ID 1262, SEQ ID 1263, SEQ ID 1264, SEQ ID 1265, SEQ ID 1266, SEQ ID 1267, SEQ ID 1268, SEQ ID 1269, SEQ ID 1270, SEQ ID 1271, SEQ ID 1272, SEQ ID 1273, SEQ ID 1274, SEQ ID 1275, SEQ ID 1276, SEQ ID 1277, SEQ ID 1278, SEQ ID 1279, SEQ ID 1280, SEQ ID 1281, SEQ ID 1282, SEQ ID 1283, SEQ ID 1284, SEQ ID 1285, SEQ ID 1286, SEQ ID 1287, SEQ ID 1288, SEQ ID 1289, SEQ ID 1290, SEQ ID 1291, SEQ ID 1292, SEQ ID 1293, SEQ ID 1294, SEQ ID 1295, SEQ ID 1296, SEQ ID 1297, SEQ ID 1298, SEQ ID 1299, SEQ ID 1300, SEQ ID 1301, SEQ ID 1302, SEQ ID 1303, SEQ ID 1304, SEQ ID 1306, SEQ ID 1307, SEQ ID 1308, SEQ ID 1309, SEQ ID 1310, SEQ ID 1311, SEQ ID 1312, SEQ ID 1313, SEQ ID 1314, SEQ ID 1315, SEQ ID 1316, SEQ ID 1317, SEQ ID 1318, SEQ ID 1319, SEQ ID 1320, SEQ ID 1321, SEQ ID 1322, SEQ ID 1323, SEQ ID 1325, SEQ ID 1326, SEQ ID 1327, SEQ ID 1328, SEQ ID 1329, SEQ ID 1330, SEQ ID 1332, SEQ ID 1333, SEQ ID 1335, SEQ ID 1336, SEQ ID 1337, SEQ ID 1338, SEQ ID 1339, SEQ ID 1341, SEQ ID 1342, SEQ ID 1343, SEQ ID 1344, SEQ ID 1345, SEQ ID 1346, SEQ ID 1347, SEQ ID 1348, SEQ ID 1349, SEQ ID 1350, SEQ ID 1351, SEQ ID 1352, SEQ ID 1353, SEQ ID 1354, SEQ ID 1355, SEQ ID 1356, SEQ ID 1357, SEQ ID 1425, SEQ ID 1426, SEQ ID 1427, SEQ ID 1428, SEQ ID 1429, SEQ ID 1430, SEQ ID 1431, SEQ ID 1432, SEQ ID 1433, SEQ ID 1434, SEQ ID 1435, SEQ ID 1436, SEQ ID 1437, SEQ ID 1438, SEQ ID 1440, SEQ ID 1441, SEQ ID 1442, SEQ ID 1443, SEQ ID 1444, SEQ ID 1445, SEQ ID 1446, SEQ ID 1447, SEQ ID 1448, SEQ ID 1449, SEQ ID 1450, SEQ ID 1451, SEQ ID 1452, SEQ ID 1453, SEQ ID 1454, SEQ ID 1455, SEQ ID 1456, SEQ ID 1457, SEQ ID 1458, SEQ ID 1459, SEQ ID 1460, SEQ ID 1461, SEQ ID 1462, SEQ ID 1463, SEQ ID 1464, SEQ ID 1465, SEQ ID 1466, SEQ ID 1467, SEQ ID 1469, SEQ ID 1470, SEQ ID 1471, SEQ ID 1472, SEQ ID 1474, SEQ ID 1475, SEQ ID 1476, SEQ ID 1477, SEQ ID 1478, SEQ ID 1479, SEQ ID 1480, SEQ ID 1481, SEQ ID 1482, SEQ ID 1484, SEQ ID 1485, SEQ ID 1487, SEQ ID 1488, SEQ ID 1489, SEQ ID 1491, SEQ ID 1492, SEQ ID 1493, SEQ ID 1494, SEQ ID 1495, SEQ ID 1496, SEQ ID 1497, SEQ ID 1498, SEQ ID 1499, SEQ ID 1500, SEQ ID 1501, SEQ ID 1502, SEQ ID 1503, SEQ ID 1504, SEQ ID 1505, SEQ ID 1506, SEQ ID 1507, SEQ ID 1508, SEQ ID 1509, SEQ ID 1510, SEQ ID 1511, SEQ ID 1512, SEQ ID 1513, SEQ ID 1514, SEQ ID 1515, SEQ ID 1516, SEQ ID 1517, SEQ ID 1518, SEQ ID 1519, SEQ ID 1520, SEQ ID 1521, SEQ ID 1522, SEQ ID 1523, SEQ ID 1524, SEQ ID 1525, SEQ ID 1526, SEQ ID 1527, SEQ ID 1528, SEQ ID 1529, SEQ ID 1530, SEQ ID 1531, SEQ ID 1532, SEQ ID 1533, SEQ ID 1534, SEQ ID 1535, SEQ ID 1536, SEQ ID 1537, SEQ ID 1538, SEQ ID 1539, SEQ ID 1540, SEQ ID 1541, SEQ ID 1542, SEQ ID 1543, SEQ ID 1544, SEQ ID 1545, SEQ ID 1546, SEQ ID 1547, SEQ ID 1548, SEQ ID 1549, SEQ ID 1550, SEQ ID 1551, SEQ ID 1552, SEQ ID 1553, SEQ ID 1554, SEQ ID 1555, SEQ ID 1556, SEQ ID 1557, SEQ ID 1558, SEQ ID 1559, SEQ ID 1560, SEQ ID 1561, SEQ ID 1562, SEQ ID 1563, SEQ ID 1564, SEQ ID 1565, SEQ ID 1566, SEQ ID 1567, SEQ ID 1568, SEQ ID 1569, SEQ ID 1570, SEQ ID 1571, SEQ ID 1572, SEQ ID 1573, SEQ ID 1574, SEQ ID 1575, SEQ ID 1576, SEQ ID 1577, SEQ ID 1578, SEQ ID 1579, SEQ ID 1580, SEQ ID 1581, SEQ ID 1582, SEQ ID 1583, SEQ ID 1584, SEQ ID 1585, SEQ ID 1586, SEQ ID 1587, SEQ ID 1588, SEQ ID 1589, SEQ ID 1590, SEQ ID 1591, SEQ ID 1592, SEQ ID 1593, SEQ ID 1594, SEQ ID 1595, SEQ ID 1596, SEQ ID 1597, SEQ ID 1598, SEQ ID 1599, SEQ ID 1600, SEQ ID 1601, SEQ ID 1602, SEQ ID 1603, SEQ ID 1604, SEQ ID 1605, SEQ ID 1606, SEQ ID 1607, SEQ ID 1608, SEQ ID 1609, SEQ ID 1610, SEQ ID 1611, SEQ ID 1612, SEQ ID 1613, SEQ ID 1614, SEQ ID 1615, SEQ ID 1616, SEQ ID 1617, SEQ ID 1618, SEQ ID 1620, SEQ ID 1621, SEQ ID 1622, SEQ ID 1623, SEQ ID 1624, SEQ ID 1625, SEQ ID 1626, SEQ ID 1627, SEQ ID 1628, SEQ ID 1629, SEQ ID 1630, SEQ ID 1631, SEQ ID 1632, SEQ ID 1633, SEQ ID 1634, SEQ ID 1635, SEQ ID 1636, SEQ ID 1637, SEQ ID 1638, SEQ ID 1639, SEQ ID 1640, SEQ ID 1641, SEQ ID 1642, SEQ ID 1643, SEQ ID 1644, SEQ ID 1645, SEQ ID 1647, SEQ ID 1648, SEQ ID 1649, SEQ ID 1650, SEQ ID 1651, SEQ ID 1652, SEQ ID 1654, SEQ ID 1656, SEQ ID 1657, SEQ ID 1658, SEQ ID 1659, SEQ ID 1660, SEQ ID 1661, SEQ ID 1663, SEQ ID 1664, SEQ ID 1665, SEQ ID 1666, SEQ ID 1667, SEQ ID 1668, SEQ ID 1669, SEQ ID 1670, SEQ ID 1671, SEQ ID 1672, SEQ ID 1673, SEQ ID 1674, SEQ ID 1675, SEQ ID 1676, SEQ ID 1677, SEQ ID 1678, SEQ ID 1679, SEQ ID 1680, SEQ ID 1681, SEQ ID 1682, SEQ ID 1683, SEQ ID 1684, SEQ ID 1685, SEQ ID 1686, SEQ ID 1687, SEQ ID 1688, SEQ ID 1689, SEQ ID 1690, SEQ ID 1692, SEQ ID 1693, SEQ ID 1694, SEQ ID 1695, SEQ ID 1696, SEQ ID 1697, SEQ ID 1698, SEQ ID 1699, SEQ ID 1701, SEQ ID 1703, SEQ ID 1704, SEQ ID 1705, SEQ ID 1706, SEQ ID 1707, SEQ ID 1708, SEQ ID 1709, SEQ ID 1710, SEQ ID 1711, SEQ ID 1712, SEQ ID 1714, SEQ ID 1715, SEQ ID 1716, SEQ ID 1717, SEQ ID 1718, SEQ ID 1719, SEQ ID 1720, SEQ ID 1721, SEQ ID 1722, SEQ ID 1723, SEQ ID 1724, SEQ ID 1725, SEQ ID 1726, SEQ ID 1727, SEQ ID 1728, SEQ ID 1729, SEQ ID 1730, SEQ ID 1731, SEQ ID 1732, SEQ ID 1733, SEQ ID 1734, SEQ ID 1735, SEQ ID 1736, SEQ ID 1737, SEQ ID 1738, SEQ ID 1739, SEQ ID 1740, SEQ ID 1741, SEQ ID 1742, SEQ ID 1743, SEQ ID 1762, SEQ ID 1763, SEQ ID 1764, SEQ ID 1765, SEQ ID 1766, SEQ ID 1767, SEQ ID 1768, SEQ ID 1769, SEQ ID 1770, SEQ ID 1771, SEQ ID 1772, SEQ ID 1773, SEQ ID 1774, SEQ ID 1775, SEQ ID 1776, SEQ ID 1777, SEQ ID 1778, SEQ ID 1779, SEQ ID 1780, SEQ ID 1781, SEQ ID 1782, SEQ ID 1783, SEQ ID 1784, SEQ ID 1785, SEQ ID 1786, SEQ ID 1787, SEQ ID 1788, SEQ ID 1789, SEQ ID 1790, SEQ ID 1791, SEQ ID 1792, SEQ ID 1793, SEQ ID 1794, SEQ ID 1795, SEQ ID 1796, SEQ ID 1797, SEQ ID 1798, SEQ ID 1799, SEQ ID 1800, SEQ ID 1801, SEQ ID 1802, SEQ ID 1803, SEQ ID 1804, SEQ ID 1805, SEQ ID 1806, SEQ ID 1807, SEQ ID 1808, SEQ ID 1809, SEQ ID 1810, SEQ ID 1811, SEQ ID 1812, SEQ ID 1813, SEQ ID 1814, SEQ ID 1815, SEQ ID 1816, SEQ ID 1817, SEQ ID 1818, SEQ ID 1819, SEQ ID 1820, SEQ ID 1821, SEQ ID 1822, SEQ ID 1823, SEQ ID 1824, SEQ ID 1825, SEQ ID 1826, SEQ ID 1832, SEQ ID 1833, SEQ ID 1836, SEQ ID 1837, SEQ ID 1838, SEQ ID 1839, SEQ ID 1840, SEQ ID 1858, SEQ ID 1859, SEQ ID 1860, SEQ ID 1861, SEQ ID 1862, SEQ ID 1863, SEQ ID 1865, SEQ ID 1866, SEQ ID 1868, SEQ ID 1869, SEQ ID 1873, SEQ ID 1877, SEQ ID 1880, SEQ ID 1883, SEQ ID 1884, SEQ ID 1888, SEQ ID 1889, SEQ ID 1890, SEQ ID 1893, SEQ ID 1894, SEQ ID 1895, SEQ ID 1896, SEQ ID 1897, SEQ ID 1898, SEQ ID 1899, SEQ ID 1900, SEQ ID 1902, SEQ ID 1903, SEQ ID 1904, SEQ ID 1906, SEQ ID 1907, SEQ ID 1908, SEQ ID 1910, SEQ ID 1911, SEQ ID 1913, SEQ ID 1914, SEQ ID 1915, SEQ ID 1916, SEQ ID 1918, SEQ ID 1920, SEQ ID 1921, SEQ ID 1922, SEQ ID 1924, SEQ ID 1928, SEQ ID 1929, SEQ ID 1930, SEQ ID 1932, SEQ ID 1933, SEQ ID 1938, SEQ ID 1939, SEQ ID 1940, SEQ ID 1941, SEQ ID 1943, SEQ ID 1944, SEQ ID 1945, SEQ ID 1946, SEQ ID 1948, SEQ ID 1949, SEQ ID 1950, SEQ ID 1952, SEQ ID 1953, SEQ ID 1956, SEQ ID 1957, SEQ ID 1958, SEQ ID 1960, SEQ ID 1962, SEQ ID 1964, SEQ ID 1966, SEQ ID 1967, SEQ ID 1970, SEQ ID 1971, SEQ ID 1972, SEQ ID 1973, SEQ ID 1974, SEQ ID 1975, SEQ ID 1977, SEQ ID 1979, SEQ ID 1981, SEQ ID 1982, SEQ ID 1985, SEQ ID 1986, SEQ ID 1987, SEQ ID 1988, SEQ ID 1989, SEQ ID 1993, SEQ ID 1995, SEQ ID 1996, SEQ ID 1997, SEQ ID 1998, SEQ ID 1999, SEQ ID 2000, SEQ ID 2001, SEQ ID 2002, SEQ ID 2003, SEQ ID 2004, SEQ ID 2005, SEQ ID 2008, SEQ ID 2009, SEQ ID 2010, SEQ ID 2011, SEQ ID 2013, SEQ ID 2014, SEQ ID 2015, SEQ ID 2017, SEQ ID 2019, SEQ ID 2020, SEQ ID 2021, SEQ ID 2023, SEQ ID 2026, SEQ ID 2028, SEQ ID 2031, SEQ ID 2032, SEQ ID 2033, SEQ ID 2035, SEQ ID 2036, SEQ ID 2037, SEQ ID 2038, SEQ ID 2042, SEQ ID 2044, SEQ ID 2048, SEQ ID 2050, SEQ ID 2051, SEQ ID 2052, SEQ ID 2053, SEQ ID 2054, SEQ ID 2055, SEQ ID 2056, SEQ ID 2057, SEQ ID 2058, SEQ ID 2059, SEQ ID 2060, SEQ ID 2061, SEQ ID 2062, SEQ ID 2063, SEQ ID 2064, SEQ ID 2065, SEQ ID 2066, SEQ ID 2067, SEQ ID 2068, SEQ ID 2069, SEQ ID 2070, SEQ ID 2071, SEQ ID 2072, SEQ ID 2073, SEQ ID 2074, SEQ ID 2075, SEQ ID 2076, SEQ ID 2077, SEQ ID 2078, SEQ ID 2079, SEQ ID 2080, SEQ ID 2081, SEQ ID 2082, SEQ ID 2083, SEQ ID 2084, SEQ ID 2085, SEQ ID 2086, SEQ ID 2087, SEQ ID 2088, SEQ ID 2089, SEQ ID 2090, SEQ ID 2091, SEQ ID 2092, SEQ ID 2093, SEQ ID 2094, SEQ ID 2095, SEQ ID 2096, SEQ ID 2097, SEQ ID 2098, SEQ ID 2099, SEQ ID 2101, SEQ ID 2102, SEQ ID 2103, SEQ ID 2104, SEQ ID 2105, SEQ ID 2106, SEQ ID 2107, SEQ ID 2108, SEQ ID 2109, SEQ ID 2110, SEQ ID 2111, SEQ ID 2112, SEQ ID 2113, SEQ ID 2114, SEQ ID 2115, SEQ ID 2116, SEQ ID 2117, SEQ ID 2118, SEQ ID 2119, SEQ ID 2120, SEQ ID 2121, SEQ ID 2122, SEQ ID 2123, SEQ ID 2124, SEQ ID 2125, SEQ ID 2126, SEQ ID 2127, SEQ ID 2146, SEQ ID 2147, SEQ ID 2148, SEQ ID 2149, SEQ ID 2150, SEQ ID 2151, SEQ ID 2152, SEQ ID 2153, SEQ ID 2154, SEQ ID 2155, SEQ ID 2156, SEQ ID 2157, SEQ ID 2158, SEQ ID 2159, SEQ ID 2160, SEQ ID 2161, SEQ ID 2162, SEQ ID 2163, SEQ ID 2164, SEQ ID 2165, SEQ ID 2166, SEQ ID 2167, SEQ ID 2168, SEQ ID 2169, SEQ ID 2170, SEQ ID 2171, SEQ ID 2172, SEQ ID 2173, SEQ ID 2174, SEQ ID 2175, SEQ ID 2176, SEQ ID 2177, SEQ ID 2178, SEQ ID 2179, SEQ ID 2180, SEQ ID 2181, SEQ ID 2182, SEQ ID 2183, SEQ ID 2184, SEQ ID 2185, SEQ ID 2186, SEQ ID 2187, SEQ ID 2188, SEQ ID 2189, SEQ ID 2190, SEQ ID 2191, SEQ ID 2192, SEQ ID 2193, SEQ ID 2194, SEQ ID 2195, SEQ ID 2196, SEQ ID 2197, SEQ ID 2198, SEQ ID 2199, SEQ ID 2200, SEQ ID 2201, SEQ ID 2202, SEQ ID 2203, SEQ ID 2204, SEQ ID 2205, SEQ ID 2206, SEQ ID 2207, SEQ ID 2208, SEQ ID 2209, SEQ ID 2210, SEQ ID 2211, SEQ ID 2212, SEQ ID 2213, SEQ ID 2214, SEQ ID 2216, SEQ ID 2220, SEQ ID 2222, SEQ ID 2223, SEQ ID 2224, SEQ ID 2225, SEQ ID 2239, SEQ ID 2240, SEQ ID 2241, SEQ ID 2242, SEQ ID 2243, SEQ ID 2244, SEQ ID 2245, SEQ ID 2246, SEQ ID 2247, SEQ ID 2248, SEQ ID 2249, SEQ ID 2250, SEQ ID 2251, SEQ ID 2252, SEQ ID 2253, SEQ ID 2254, SEQ ID 2255, SEQ ID 2256, SEQ ID 2257, SEQ ID 2258, SEQ ID 2259, SEQ ID 2260, SEQ ID 2261, SEQ ID 2262, SEQ ID 2263, SEQ ID 2264, SEQ ID 2265, SEQ ID 2266, SEQ ID 2267, SEQ ID 2268, SEQ ID 2269, SEQ ID 2270, SEQ ID 2271, SEQ ID 2272, SEQ ID 2273, SEQ ID 2274, SEQ ID 2275, SEQ ID 2276, SEQ ID 2277, SEQ ID 2278, SEQ ID 2279, SEQ ID 2280, SEQ ID 2281, SEQ ID 2282, SEQ ID 2283, SEQ ID 2284, SEQ ID 2285, SEQ ID 2286, SEQ ID 2287, SEQ ID 2288, SEQ ID 2289, SEQ ID 2290, SEQ ID 2291, SEQ ID 2292, SEQ ID 2293, SEQ ID 2294, SEQ ID 2295, SEQ ID 2296, SEQ ID 2297, SEQ ID 2298, SEQ ID 2299, SEQ ID 2300, SEQ ID 2301, SEQ ID 2302, SEQ ID 2303, SEQ ID 2304, SEQ ID 2305, SEQ ID 2306, SEQ ID 2307, SEQ ID 2308, SEQ ID 2309, SEQ ID 2310, SEQ ID 2311, SEQ ID 2312, SEQ ID 2313, SEQ ID 2314, SEQ ID 2315, SEQ ID 2316, SEQ ID 2317, SEQ ID 2318, SEQ ID 2319, and SEQ ID 2320.

27. The antisense oligonucleotide progranulin agonist according to any one of claims 22-26, wherein the antisense oligonucleotide progranulin agonist is selected from the group consisting of SEQ ID 693, SEQ ID 707, SEQ ID 708, SEQ ID 709, SEQ ID 710, SEQ ID 711, SEQ ID 720, SEQ ID 721, SEQ ID 723, SEQ ID 724, SEQ ID 725, SEQ ID 726, SEQ ID 727, SEQ ID 730, SEQ ID 732, SEQ ID 736, SEQ ID 737, SEQ ID 738, SEQ ID 739, SEQ ID 741, SEQ ID 743, SEQ ID 745, SEQ ID 747, SEQ ID 758, SEQ ID 759, SEQ ID 760, SEQ ID 761, SEQ ID 766, SEQ ID 775, SEQ ID 798, SEQ ID 800, SEQ ID 801, SEQ ID 802, SEQ ID 803, SEQ ID 804, SEQ ID 807, SEQ ID 812, SEQ ID 813, SEQ ID 814, SEQ ID 816, SEQ ID 818, SEQ ID 819, SEQ ID 822, SEQ ID 823, SEQ ID 824, SEQ ID 825, SEQ ID 826, SEQ ID 827, SEQ ID 828, SEQ ID 830, SEQ ID 831, SEQ ID 833, SEQ ID 835, SEQ ID 836, SEQ ID 837, SEQ ID 838, SEQ ID 839, SEQ ID 840, SEQ ID 841, SEQ ID 842, SEQ ID 843, SEQ ID 844, SEQ ID 845, SEQ ID 846, SEQ ID 847, SEQ ID 848, SEQ ID 849, SEQ ID 850, SEQ ID 854, SEQ ID 855, SEQ ID 856, SEQ ID 857, SEQ ID 859, SEQ ID 861, SEQ ID 866, SEQ ID 867, SEQ ID 868, SEQ ID 869, SEQ ID 871, SEQ ID 873, SEQ ID 874, SEQ ID 876, SEQ ID 878, SEQ ID 879, SEQ ID 880, SEQ ID 881, SEQ ID 883, SEQ ID 885, SEQ ID 887, SEQ ID 888, SEQ ID 890, SEQ ID 891, SEQ ID 892, SEQ ID 893, SEQ ID 895, SEQ ID 897, SEQ ID 906, SEQ ID 909, SEQ ID 916, SEQ ID 918, SEQ ID 926, SEQ ID 927, SEQ ID 928, SEQ ID 932, SEQ ID 933, SEQ ID 934, SEQ ID 967, SEQ ID 998, SEQ ID 1000, SEQ ID 1001, SEQ ID 1002, SEQ ID 1003, SEQ ID 1005, SEQ ID 1010, SEQ ID 1011, SEQ ID 1012, SEQ ID 1021, SEQ ID 1023, SEQ ID 1024, SEQ ID 1027, SEQ ID 1030, SEQ ID 1037, SEQ ID 1038, SEQ ID 1039, SEQ ID 1041, SEQ ID 1042, SEQ ID 1048, SEQ ID 1049, SEQ ID 1050, SEQ ID 1051, SEQ ID 1054, SEQ ID 1058, SEQ ID 1060, SEQ ID 1061, SEQ ID 1063, SEQ ID 1066, SEQ ID 1070, SEQ ID 1071, SEQ ID 1072, SEQ ID 1073, SEQ ID 1075, SEQ ID 1078, SEQ ID 1081, SEQ ID 1083, SEQ ID 1084, SEQ ID 1085, SEQ ID 1086, SEQ ID 1091, SEQ ID 1092, SEQ ID 1093, SEQ ID 1109, SEQ ID 1111, SEQ ID 1112, SEQ ID 1113, SEQ ID 1114, SEQ ID 1115, SEQ ID 1116, SEQ ID 1117, SEQ ID 1118, SEQ ID 1119, SEQ ID 1120, SEQ ID 1121, SEQ ID 1122, SEQ ID 1123, SEQ ID 1124, SEQ ID 1125, SEQ ID 1126, SEQ ID 1127, SEQ ID 1128, SEQ ID 1129, SEQ ID 1130, SEQ ID 1132, SEQ ID 1135, SEQ ID 1136, SEQ ID 1137, SEQ ID 1138, SEQ ID 1139, SEQ ID 1140, SEQ ID 1141, SEQ ID 1142, SEQ ID 1143, SEQ ID 1144, SEQ ID 1146, SEQ ID 1188, SEQ ID 1189, SEQ ID 1190, SEQ ID 1191, SEQ ID 1192, SEQ ID 1196, SEQ ID 1200, SEQ ID 1201, SEQ ID 1202, SEQ ID 1203, SEQ ID 1204, SEQ ID 1205, SEQ ID 1206, SEQ ID 1207, SEQ ID 1208, SEQ ID 1209, SEQ ID 1223, SEQ ID 1224, SEQ ID 1238, SEQ ID 1243, SEQ ID 1244, SEQ ID 1258, SEQ ID 1259, SEQ ID 1262, SEQ ID 1263, SEQ ID 1264, SEQ ID 1267, SEQ ID 1268, SEQ ID 1271, SEQ ID 1276, SEQ ID 1282, SEQ ID 1283, SEQ ID 1284, SEQ ID 1285, SEQ ID 1286, SEQ ID 1288, SEQ ID 1290, SEQ ID 1291, SEQ ID 1292, SEQ ID 1294, SEQ ID 1297, SEQ ID 1298, SEQ ID 1304, SEQ ID 1311, SEQ ID 1313, SEQ ID 1314, SEQ ID 1315, SEQ ID 1344, SEQ ID 1345, SEQ ID 1346, SEQ ID 1347, SEQ ID 1348, SEQ ID 1349, SEQ ID 1352, SEQ ID 1355, SEQ ID 1357, SEQ ID 1425, SEQ ID 1426, SEQ ID 1427, SEQ ID 1428, SEQ ID 1430, SEQ ID 1431, SEQ ID 1432, SEQ ID 1433, SEQ ID 1434, SEQ ID 1435, SEQ ID 1436, SEQ ID 1437, SEQ ID 1438, SEQ ID 1440, SEQ ID 1441, SEQ ID 1442, SEQ ID 1443, SEQ ID 1444, SEQ ID 1445, SEQ ID 1446, SEQ ID 1447, SEQ ID 1448, SEQ ID 1449, SEQ ID 1450, SEQ ID 1451, SEQ ID 1454, SEQ ID 1455, SEQ ID 1456, SEQ ID 1457, SEQ ID 1460, SEQ ID 1461, SEQ ID 1462, SEQ ID 1463, SEQ ID 1464, SEQ ID 1467, SEQ ID 1469, SEQ ID 1474, SEQ ID 1478, SEQ ID 1480, SEQ ID 1482, SEQ ID 1488, SEQ ID 1492, SEQ ID 1493, SEQ ID 1497, SEQ ID 1498, SEQ ID 1505, SEQ ID 1506, SEQ ID 1507, SEQ ID 1509, SEQ ID 1510, SEQ ID 1512, SEQ ID 1513, SEQ ID 1514, SEQ ID 1515, SEQ ID 1517, SEQ ID 1520, SEQ ID 1524, SEQ ID 1525, SEQ ID 1528, SEQ ID 1529, SEQ ID 1530, SEQ ID 1531, SEQ ID 1532, SEQ ID 1533, SEQ ID 1534, SEQ ID 1535, SEQ ID 1536, SEQ ID 1537, SEQ ID 1538, SEQ ID 1539, SEQ ID 1540, SEQ ID 1541, SEQ ID 1542, SEQ ID 1544, SEQ ID 1545, SEQ ID 1546, SEQ ID 1547, SEQ ID 1548, SEQ ID 1549, SEQ ID 1550, SEQ ID 1551, SEQ ID 1552, SEQ ID 1553, SEQ ID 1554, SEQ ID 1555, SEQ ID 1556, SEQ ID 1558, SEQ ID 1560, SEQ ID 1563, SEQ ID 1565, SEQ ID 1568, SEQ ID 1569, SEQ ID 1575, SEQ ID 1577, SEQ ID 1578, SEQ ID 1579, SEQ ID 1582, SEQ ID 1583, SEQ ID 1584, SEQ ID 1585, SEQ ID 1586, SEQ ID 1587, SEQ ID 1588, SEQ ID 1589, SEQ ID 1590, SEQ ID 1591, SEQ ID 1593, SEQ ID 1594, SEQ ID 1595, SEQ ID 1596, SEQ ID 1599, SEQ ID 1608, SEQ ID 1609, SEQ ID 1610, SEQ ID 1611, SEQ ID 1612, SEQ ID 1613, SEQ ID 1614, SEQ ID 1615, SEQ ID 1616, SEQ ID 1617, SEQ ID 1618, SEQ ID 1620, SEQ ID 1621, SEQ ID 1622, SEQ ID 1623, SEQ ID 1624, SEQ ID 1626, SEQ ID 1630, SEQ ID 1631, SEQ ID 1633, SEQ ID 1635, SEQ ID 1637, SEQ ID 1638, SEQ ID 1639, SEQ ID 1643, SEQ ID 1644, SEQ ID 1645, SEQ ID 1648, SEQ ID 1649, SEQ ID 1651, SEQ ID 1658, SEQ ID 1667, SEQ ID 1669, SEQ ID 1677, SEQ ID 1679, SEQ ID 1681, SEQ ID 1684, SEQ ID 1685, SEQ ID 1686, SEQ ID 1688, SEQ ID 1689, SEQ ID 1690, SEQ ID 1692, SEQ ID 1704, SEQ ID 1707, SEQ ID 1708, SEQ ID 1709, SEQ ID 1710, SEQ ID 1711, SEQ ID 1712, SEQ ID 1714, SEQ ID 1715, SEQ ID 1717, SEQ ID 1718, SEQ ID 1719, SEQ ID 1720, SEQ ID 1721, SEQ ID 1722, SEQ ID 1723, SEQ ID 1724, SEQ ID 1725, SEQ ID 1726, SEQ ID 1727, SEQ ID 1728, SEQ ID 1731, SEQ ID 1732, SEQ ID 1733, SEQ ID 1734, SEQ ID 1735, SEQ ID 1736, SEQ ID 1737, SEQ ID 1738, SEQ ID 1741, SEQ ID 1742, SEQ ID 1762, SEQ ID 1764, SEQ ID 1765, SEQ ID 1766, SEQ ID 1767, SEQ ID 1768, SEQ ID 1769, SEQ ID 1770, SEQ ID 1771, SEQ ID 1773, SEQ ID 1775, SEQ ID 1776, SEQ ID 1779, SEQ ID 1780, SEQ ID 1781, SEQ ID 1782, SEQ ID 1783, SEQ ID 1784, SEQ ID 1785, SEQ ID 1786, SEQ ID 1787, SEQ ID 1789, SEQ ID 1791, SEQ ID 1792, SEQ ID 1794, SEQ ID 1795, SEQ ID 1796, SEQ ID 1800, SEQ ID 1801, SEQ ID 1802, SEQ ID 1804, SEQ ID 1805, SEQ ID 1806, SEQ ID 1807, SEQ ID 1808, SEQ ID 1809, SEQ ID 1811, SEQ ID 1812, SEQ ID 1813, SEQ ID 1814, SEQ ID 1815, SEQ ID 1816, SEQ ID 1817, SEQ ID 1818, SEQ ID 1819, SEQ ID 1820, SEQ ID 1821, SEQ ID 1822, SEQ ID 1823, SEQ ID 1824, SEQ ID 1832, SEQ ID 1833, SEQ ID 1838, SEQ ID 1839, SEQ ID 1840, SEQ ID 1862, SEQ ID 1866, SEQ ID 1868, SEQ ID 1873, SEQ ID 1877, SEQ ID 1883, SEQ ID 1884, SEQ ID 1888, SEQ ID 1889, SEQ ID 1893, SEQ ID 1894, SEQ ID 1928, SEQ ID 1929, SEQ ID 1933, SEQ ID 1938, SEQ ID 1939, SEQ ID 1940, SEQ ID 1941, SEQ ID 1943, SEQ ID 1944, SEQ ID 1948, SEQ ID 1950, SEQ ID 1952, SEQ ID 1956, SEQ ID 1966, SEQ ID 1985, SEQ ID 1986, SEQ ID 1996, SEQ ID 1997, SEQ ID 1998, SEQ ID 1999, SEQ ID 2000, SEQ ID 2005, SEQ ID 2013, SEQ ID 2015, SEQ ID 2020, SEQ ID 2023, SEQ ID 2026, SEQ ID 2028, SEQ ID 2031, SEQ ID 2032, SEQ ID 2033, SEQ ID 2042, SEQ ID 2048, SEQ ID 2052, SEQ ID 2053, SEQ ID 2055, SEQ ID 2056, SEQ ID 2057, SEQ ID 2058, SEQ ID 2059, SEQ ID 2060, SEQ ID 2061, SEQ ID 2063, SEQ ID 2065, SEQ ID 2066, SEQ ID 2067, SEQ ID 2068, SEQ ID 2070, SEQ ID 2072, SEQ ID 2073, SEQ ID 2075, SEQ ID 2076, SEQ ID 2079, SEQ ID 2080, SEQ ID 2081, SEQ ID 2082, SEQ ID 2083, SEQ ID 2084, SEQ ID 2085, SEQ ID 2086, SEQ ID 2087, SEQ ID 2088, SEQ ID 2089, SEQ ID 2090, SEQ ID 2091, SEQ ID 2092, SEQ ID 2093, SEQ ID 2094, SEQ ID 2095, SEQ ID 2097, SEQ ID 2116, SEQ ID 2119, SEQ ID 2120, SEQ ID 2121, SEQ ID 2122, SEQ ID 2123, SEQ ID 2124, SEQ ID 2125, SEQ ID 2126, SEQ ID 2127, SEQ ID 2146, SEQ ID 2147, SEQ ID 2148, SEQ ID 2158, SEQ ID 2160, SEQ ID 2162, SEQ ID 2163, SEQ ID 2165, SEQ ID 2166, SEQ ID 2167, SEQ ID 2168, SEQ ID 2169, SEQ ID 2170, SEQ ID 2171, SEQ ID 2172, SEQ ID 2173, SEQ ID 2174, SEQ ID 2175, SEQ ID 2176, SEQ ID 2177, SEQ ID 2181, SEQ ID 2182, SEQ ID 2183, SEQ ID 2184, SEQ ID 2185, SEQ ID 2186, SEQ ID 2187, SEQ ID 2193, SEQ ID 2194, SEQ ID 2195, SEQ ID 2196, SEQ ID 2197, SEQ ID 2198, SEQ ID 2199, SEQ ID 2200, SEQ ID 2202, SEQ ID 2203, SEQ ID 2204, SEQ ID 2206, SEQ ID 2208, SEQ ID 2209, SEQ ID 2210, SEQ ID 2211, SEQ ID 2212, SEQ ID 2213, SEQ ID 2214, SEQ ID 2216, SEQ ID 2222, SEQ ID 2224, SEQ ID 2239, SEQ ID 2240, SEQ ID 2242, SEQ ID 2243, SEQ ID 2244, SEQ ID 2245, SEQ ID 2246, SEQ ID 2247, SEQ ID 2248, SEQ ID 2251, SEQ ID 2252, SEQ ID 2253, SEQ ID 2254, SEQ ID 2255, SEQ ID 2256, SEQ ID 2257, SEQ ID 2258, SEQ ID 2259, SEQ ID 2260, SEQ ID 2261, SEQ ID 2262, SEQ ID 2263, SEQ ID 2264, SEQ ID 2265, SEQ ID 2266, SEQ ID 2267, SEQ ID 2268, SEQ ID 2269, SEQ ID 2280, SEQ ID 2281, SEQ ID 2282, SEQ ID 2283, SEQ ID 2284, SEQ ID 2285, SEQ ID 2294, SEQ ID 2295, SEQ ID 2302, SEQ ID 2307, SEQ ID 2308, SEQ ID 2309, SEQ ID 2310, SEQ ID 2311, SEQ ID 2312, SEQ ID 2316, SEQ ID 2317, SEQ ID 2318, SEQ ID 2319, and SEQ ID 2320.

28. The antisense oligonucleotide progranulin agonist according to any one of claims 1-20, wherein the antisense oligonucleotide progranulin agonist is or comprises an antisense oligonucleotide mixmer or totalmer.

29. The antisense oligonucleotide progranulin agonist of any one of claims 1-28, wherein the antisense oligonucleotide progranulin agonist or contiguous nucleotide sequence thereof is 10-20 nucleotides in length.

30. An antisense oligonucleotide progranulin agonist having the structure:

[chemical structure]

31. An antisense oligonucleotide progranulin agonist wherein the oligonucleotide is the oligonucleotide compound TgGccAggGatCagGG (SEQ ID NO: 106) wherein capital letters represent beta-D-oxy LNA nucleosides, lowercase letters represent DNA nucleosides, all LNA C are 5-methyl cytosine, and all internucleoside linkages are phosphorothioate internucleoside linkages.

32. An antisense oligonucleotide progranulin agonist according to any one of claims 1-31 covalently attached to at least one conjugate moiety.

33. An antisense oligonucleotide progranulin agonist according to any one of claims 1-32 wherein the antisense oligonucleotide progranulin agonist is in the form of a pharmaceutically acceptable salt.

34. An antisense oligonucleotide progranulin agonist according to claim 33 wherein the salt is a sodium salt or a potassium salt.

35. A pharmaceutical composition comprising the antisense oligonucleotide progranulin agonist according to any one of claims 1-34 and a pharmaceutically acceptable diluent, solvent, carrier, salt and/or adjuvant.

36. A pharmaceutical composition according to claim 35, wherein the pharmaceutical composition comprises an aqueous diluent or solvent, such as phosphate buffered saline.

37. An in vivo or in vitro method for enhancing the expression of progranulin in a cel which is expressing progranulin, said method comprising administering an antisense oligonucleotide progranulin agonist according to any one of claims 1-34, or the pharmaceutical composition according to claim 35 or claim 36 in an effective amount to said cell.

38. The method according to claim 37, wherein the cell is either a human cell or a mammalian cell.

39. A method for treating or preventing neurological disease comprising administering a therapeutically or prophylactically effective amount of an antisense oligonucleotide progranulin agonist according to any one of claims 1-34 or the pharmaceutical composition according to claim 35 or claim 365 to a subject suffering from or susceptible to neurological disease.

40. The antisense oligonucleotide progranulin agonist according to any one of claims 1-34, or the pharmaceutical composition according to claim 35 or claim 36 for use as a medicament.

41. The antisense oligonucleotide progranulin agonist according to any one of claims 1-33, or the pharmaceutical composition according to claim 35 or claim 36 for use in the treatment of a neurological disease.

42. The antisense oligonucleotide progranulin agonist or pharmaceutical composition for use in the treatment of a neurological disease according to claim 41, wherein the neurological disease is a TDP-43 pathology.

43. The antisense oligonucleotide progranulin agonist according to any one of claims 1-34 or the pharmaceutical composition according to claim 35 or claim 36 for use in the treatment of progranulin haploinsufficiency.

44. Use of the antisense oligonucleotide progranulin agonist according to claims 1-34, or the pharmaceutical composition according to claim 35 or claim 36 for the preparation of a medicament for treatment or prevention of a neurological disease.

45. Use of an antisense oligonucleotide progranulin agonist, or pharmaceutical composition according to claim 44, wherein the neurological disease is a TDP-43 pathology.

46. Use of the antisense oligonucleotide progranulin agonist according to claims 1-34, or the pharmaceutical composition according to claim 35 or claim 36, for the preparation of a medicament for treatment of progranulin haploinsufficiency.

47. The method or use according to any one of claims 37-46, wherein the method or use is for the treatment of fronto temporal dementia (FTD), neuropathologic frontotemporal lobar degeneration or neuroinflammation.
